United States Patent Application Publication US 2026/0027161 A1 - sequence listing, part 4

SEQ ID NO: 14 - DNA, 281836 bp, Intestinicoccus colisanans
  source 1..281836: mol_type = genomic DNA
tcgctttacggcggaggccgataaacagaaaaacgcttttgaccttgacaggctcattaaccgccgcaggcggcccggtctgaacgaggcgtgtacgatgtatgaggtgactgtgccggacgatgcactcacagaagaggacgaggacatcctcaactatgatgacatcgacgatccagacgcctttgcataaacgcttcgagacaaagtgtcccgaagtttgtaacctgccgcctgcaagggcggcttttttgttaccgggaaaatcccggagaaatggaggcttatatggcatttttctcatctgcaatcgacactttacagaccctcgttattgctctcggtgctggccttggcgtgtggggcgtggttaatctgctggagggctacggctcggataacccgggctccaatgctcatgtacggtaaggaagcaagcaaccgaaaacaagagatagaccgccagcactacactattccgaaccaaagaccaaaagataagcattgtgggaaaatctaaacttttggattttcctacaatgccaactacggcggaatccctcccactccttatatctttctgtatacattgaatttgtatttagtaaaatgcagacaacaccacggatcggcttttggttggacaattccaaccaaacaccacagcagacagcagaaaacattctgaacgctaggaagccggtatgattgttacatataaggggaagaaaaatttcttttaggtacttgctttcctaaaactgatgtgatataatagcttcattccagaaaaggagtaaaaaatacgcggcaaggtattcttaaataaaactataatcaaatagtgggaacaaaggattatgatagctccttttgtaggggcttagttttttgtacccaatttaagaatacttttgccttatcaattttgacatatccccaaaaacagcaatcacaaacaggtgtatgctgtatatgtgtatgtccgcaacttataatccccagtggtaaaagtattttactgctggggatttttatgccctttggggctgtaaagggaggacaatcacatgaaaataatcaatattggaattcttgcccatgtagacgctggaaagacgaccttgacggagagcctgctatatgccagcggagccatttcagaaccggggagcgtcgaaaaagggacaacgaggacggacaccatgtttttggagcggcagcgtgggattaccattcaagcggcagtcacttccttccagtggcacagatgtaaagttaacattgtggatacgcccggccacatggattttttggcggaggtgtaccgctctttggctgttttagatggggccatcttggtgatctccgctaaagatggcgtgcaggcccagacccgtattctgttccatgccctgcggaaaatgaacattcccaccgttatctttatcaacaagatcgaccaggctggcgttgatttgcagagcgtggttcagtctgttcgggataagctctccgccgatattatcatcaagcagacggtgtcgctgtccccggaaatagtcctggaggaaaataccgacatagaagcatgggatgcggtcatcgaaaataacgatgaattattggaaaagtatatcgcaggagaaccaatcagccgggaaaaacttgcgcgggaggaacagcagcgggttcaagacgcctccctgttcccagtctatcatggcagcgccaaaaatggccttggcattcaaccgttgatggatgcggtgacagggctgttccaaccgattggggaacaggggggcgccgccctatgcggcagcgttttcaaggttgagtacaccgattgcggccagcggcgtgtctatctacggttatacagcggaacgctgcgcctgcgggatacggtggccctggccgggagagaaaagctgaaaatcacagagatgcgtattccatccaaaggggaaattgttcggacagacaccgcttatcagggtgaaattgttatccttcccagcgacagcgtgaggttaaacgatgtattaggggaccaaacccggctccctcgtaaaaggtggcgcgaggaccccctccccatgctgcggacgacgattgcgccgaaaacggcagcgcaaagagaacggctgctggacgctcttacgcaacttgcggatactgacccgcttttgcgttgcgaagtggattccatcacccatgagatcattctttcttttttgggccgggtgcagttggaggttgtttccgctttgctgtcggaaaaatacaagcttgaaacagtggtaaaggaaccctccgtcatttatatggagcggccgctcaaagcagccagccacaccatccatatcgaggtgccgcccaacccgttttgggcatccataggactgtctgttacaccactctcgcttggctccggtgtacaatacgagagccgggtttcgctgggatacttgaaccagagttttcaaaacgctgtcagggatggtatccgttacgggctggagcagggcttgttcggctggaacgtaacggactgtaagatttgctttgaatacgggctttattacagtccggtcagcacgccggcggacttccgctcattggccccgattgtattggaacaggcattgaaggaatcggggacgcagctgctggaaccttatctctccttcatcctctatgcgccccaggaatacctttccagggcttatcatgatgcaccgaaatactgtgccaccatcgaaacggcccaggtaaaaaaggatgaagttgtctttactggcgagattcccgcccgctgtatacaggcataccgtactgatctggccttttacaccaacgggcggagcgtatgccttacagagctgaaaggatatcaggccgctgtcggtcagccggtcatccagccccgccgtccaaacagccgcctggacaaggtgcgccatatgtttcagaaggtaatgtaaagatacataatcgtcaaggcggcaacaatcagaagttatggagggtaacaatggaatatagtaaggaagatttaatggaagcaaaaaagcaaatttggggagtgggagagaacatgggaacagaggaaagtaaaaaaatctgggaggagaacgcacaattttgggataatgcaatgggtgacgaatctaatgaatttcacagagaggtagtgcgtcccaaagtaacggaacttctatctcctaatcctgcggattacattttggatattgcgtgtggcaatggaaattattcttcgtatcttgcacaaagaggcgcttcggttgtcgcttttgattacagcaaaaaaatgatagaattggctaaaagacggcaatcacaatatgcaaaacaaattgaattttgtgtggcggatgcgaccgatagaaaaagtatattagaattaaaaagaaatcgagcctttacgaaagcagtttctaatatggcaattatggatattacggatattgaaccacttcttatggctgtttatgaactgttgcaggaaagcggaatttttgtctttgcaacgcaacacccttgttttgtcacgttgactgaaaaatatatgacaccgcacagttactatgatatagcgattgaagggcaaccgaaagagcagatttattatcatcgttccatacaagatatttttaacctttgttttagagctggatttgtcattgatggattttatgaagaatgttttaaaaccaacaaagaaattcctatggtaatgatagtaaggcttaagaaggtaaaacgtgatagcttaaaataaattcaagtttgtcgggtaaatagcaaacccagccgagccagtcaacggtcaagatgaacggcgcatatgcgcagccgttgacagccccgcccgcctttgctggtaggcaatcaaggggcgacagcctaaagtgctgccgccccttactatcataaaaagcaactactaaccagccacagcccttttgggaggaaagggggattttccatgacctgtacagaagaatatcgggaacatatcgagtacactttccatgccttttgcaaagtcgttatccgaaatgcaacgatcaacgcagcgaggacacggagcaggaagcacaaaagagaaatatcccttgaatacctcacagacgaaaagcactaccctttaggcacgacagatgaatatttccaagccccggagccggacgaggaatacatacttaccctttgcggcgatacggtcattttcagcagcggcttacttgcggaagccctgtcacggctggacgaacgggagcgggaaatgatttacctgtcctttttcaagcgtattccacagcacgaaattggcagacagtacgggcgcagccgcagcacagcgggctaccatatccgaaaagccctacggcagctccaagcggaaatggagggaatagcgcatgaagaataacaggcttctcccttatgaaacaatcgtacaagccgccagcggggagccggaagcggtgggaaccgtgttgcagtattaccgccgccgcatacagtgtgccgcccgtgtgaatggacggatagaccaagatacagaggactacatcacccagacgcttctcacagctatattcaagttccgctttgggagatagctctaccgcctacaactgaataaccgccgcttcgccggcaaccagaaagcagtaaatctattcaacggatttgctgcttttttcgttcctgttcggcgtttttgaaaatccccagtatgaaaaaacaaaagagaaaatagccgccgcagttggcaaaagcctgttcctatccgtggagggtatcaaagaaaaaatactgccattgtccgcctattccggcttgcgtggtgttgtagggaataaggggaaatttctaaaaatctccgtctattctgcttttcgtggtgttgtaggtagtgaaaggaaaattttcaagatatgccggaatagcgggtagcaaagcccttttgaaacgtcttgttagcggaaaggacgggaaccggggaacgccggagtttttcagagcaagattctaccacagtaccaaaattcgcttatccgctcattttgcccctgcgggaatcttgttggggagtgccttccccaaaccctgctatgcgccctgtcgggcgagaaaggaggtcacagaccatgcgaaagaaatacaacacgccccaccgccgccatgtggttaaaacccgcctgtctgatgaagaatacgccgacttcacggagcggctggcggcgtatgaaatcagccagtccgaatttatccggcaagccatacggggagcgaccatacgccccgtgattaccgtttcccctgtcaatgacgggctgcttgccgccctctccaagctcacagcggagtacgggaaaatcggtggaaacctcaaccagatagcccggagccttaacgagtacggcgcaccttataccgccttatccggcgaggtacggggagctgccgccgaccttgccgccttgaagtttgaagtcttgcagaaagtaggtgaagccgttggcgatactcaaacatatcagctctaaaaatgccaactacgggaacgctgaaaaatacctcacattcgagcatgacgagtttaccatgaagcccacccttgacgcagacgggcggctcataccgagggcagactaccgcatatcctctctgaattgtgacggggaggattttgccgttgcctgtatgcgctccaatctccgctatggcaagaaccagaaacgggaggacgttaagagccaccactatatcatcagctttgacccacgggacggcccggacaacggcttgaccgttgatcgggcgcaggagctgggcgagaagttctgcgccgagcatttccccggacaccaggctcttgtctgcacccacccggacgggcacagccacaccgaaaatatccatgtgcatatcgtcattaacagtctgcggattgcggaggttcccatgctgccccacatggacaggccagcggacaggaaagcaggctgcaagcaccgctgcacagacgcagctatgaactatctgaaagccgaagtcatggaaatgtgccacagcgaggggctttatcagatagaccttttgaacggcagcaaggagcgcattaccgagcgtgaatattgggcgcagaagaaaggacaggttgcgctggataaagcaaacgcccctatgattgcggacggtatcacgccccggcagaccaagtttgaaacggataaggcgaagctgcgccggactatccgggaagcccttgccgctgcttccggctttgatgagtttgccgccctgcttctccggcatggtgtgaccgtcaaggagagccgggggcggctaagttacctcacgccggacaggacgaagccaattaccgcccggaagctgggggacgattttgaccgggctgctgtcctctccgttttggagcagaacgccgccagagccgccgaaaaacccgcagccatagcggaataccccggcagtatcaaagaccgcttacggacgaaaaaagaagcgaaaaacgccccgaacaatgacgctgtacagcgcatggtagacatagccgccaagcgagccgaggggaaaggacggggctatgagaagtgggcgactatgcacaacctcaaacagatgtcggctaccctcatgctctaccagcagtacggcttttcttccccggacgagctggacgctgccatttccgcagccaacgccgccacgcaggagagccttgccgggctgaaagggctggaagccgctatccgggagaaaaaggaattgcagcgcaaccttttgggctatatcggcacgaagcccgcccgtgacggtctgaaagcgcagaaatcggagaaagcccggagagcctaccgggagcagcacgaaagcgattttctcatagcggacgcagccgcccgctatttccgggagcatggaataaccaagctgcccgccagcaaagccctgcaaagggagatcgagcagcttaccgtccagaagaacgccggatataacgactaccgggagaaacgccagcgggcgcaggagcttcagacagtcagacgcaatatcgaccagattttaaggggcgcaccgagccagcagaaaaagcgtgaacaggagcgttaaagaccgccccgaaatgataccgaaaccctacaaaaatacaggtatgatatgaacccttaccgcaatactccccgacttccaaacggggcttacagggcagaaaaagcccgaaaatgataccgagaacatacagaaaatgccccctatcccgctacaccgataggaacggcagaaaggagcttaccattgccgagaatgagcaagaagcggcggctggaatggtctttcttcctcaaccaccgcaaccgtatcacttacaacgacctatgccggggctgcacccgtgactgcaaacagagcttccgggcggttatcatactatgccctcgctattattccaaacgctggaaaaaggaggacgcagcctatggcagataaccgcaaatattactacctcaagctgaaagagagctattttgacgatgatgcaatcgttctgctggaaagtatgcaggacggcgttatctattccaacattctcttgaagctgtacttgaaatcgctgaaaaacggcgggaaattgcagcttgacgagaatatcccctacaccgcccagatgattgcgaccattacccgccagcaggtaggtaccgtagagagagctttgaaaatctttatgaagctggggcttgtggagcctttgccaagcggcgcactctacatgagcaacattgagcttttaatcggccagtcctctaccgagggggagcgcaagcgcagggcgcggctggctttgcaggaacaaaaagccctgccgcagacaggggcggacaaatgtccaccatatcgagcggacatttgtccaccagagatagagatagagaaagagatagatatagaaatagaaaaagagagagagttagaaacgggacaccccgcccccgccgcctatggcagataccacaatgtcattctttccgatacggagcttgacgggctgaaaacagagcttcccggcaagtgggagtattacattgaccgcctatcctgccatatcgcttccagcgggaggaaatacaagagccatgcagccacgattttcaagtgggcgcaggaggacgcagccaagaaagccccgaaaaagggcatacccgattatacctgtaaggagggcgagagcttatgacgaatggatttgatgaaatgattttgaatatgaccgacaccacgccggagccggaggactacaccggcgaggacgggcttttatactgcgggaagtgccacaagcccaaagagggctatttccccaaagaaaccgccgcatggctggggcgtgaccgccacccggcagaatgtgactgccagcgggcagagcgtgaggaacgggaagccgcagagaaacagcgcagtcaccttgaaactgtcgagcggttgaagcggcggggctttacagacccggctatgcagggctggacgtttgagaacgacaacggcaagtgcccgcaaatggaacacgcccatttctatgtggagaactgggaaaccatgaaagagcgcaacattggctatctgctatggggcggcgttggcacaggcaagagctattttgcgggctgtatcgcaaatgcccttatggagcgtgaaatccccgtgtgcatgacaaactttgcattgatattgggtgaccttgccgccagctttgagggcaggaatgaatatatctcccgactttgcagcttcccgctgcttatccttgacgattttggaatggaacggggaacggaatacggcttagagcaggtctacaacgtgattgacagccgttaccgcagcggcaggccgctgatcgtcacgactaatctcacgctggaggacttgcagcacccggaggacaccgcccacgcccgcatttatgaccgtctgattgaaatgtgttctcctgtccgctttaccgggagcaacttccgaaaagccacggcgcaggagaaaatgggacaactgaaaaagctgatgaacagaaaggagagccgcctatgaccaacaccccaaagaatgaccgcagcacccgccgcccggattgcgtgacggaaatccgcataggtaattctgtccttgtcgtttccggctatttcaagcaggacaccaccgccaccgccgccgataaaatgctgaaagtgctggaagcggaagctgctacacaaaaatcggcaatttgacgggacgtaaagaagcagaaaggactgtacagccagccccggcgtgtggtatgatagtcatacggaatagtggggctggctgtcggaaatggaggacactatgttaagacagaccacccgaaaccttattaccgccctttatccgagattatcccacgaggacgagctgcaaggtgagagcaattctatttcaaaccagaagcgtattcttgaaacctatgcgaagcagaacggcttttccaatctgcaatggtacacagatgacggttattctggggcgaacttccaaagacccggttttcaagccatgcttgcggacattgaagccggaaaagtcggcaccgttatcgtcaaggatatgtcacggttagggcgaaactatctgcaagtgggaatgtatacggaaatgattttcccacagaaaggcgtccgctttatcgctatcaatgacggagtggacagcgcacagggcgacaatgattttgcccctctgcggaacatttttaacgaatggctggtgagagatacgagcaagaaaatcaaagcagtaaaacggtctaagggtatgagcgggaagcccgtcacgagcaaacccgtatacggctactttatggacgaggacgaaaattttatcattgacggggaagccgcccctgttgtgcggcagatttacagcttgtgccttgccgggaacgggccgaccaagatagcccgtatgctcacagagcaggagatccccacgccgggaacgctggaataccgtcggacgggaagcacccgccgctaccaccccggctatgagtgcaagtgggcgaccaataccgtggtacatatccttgaaaacagggagtacacgggctgtctggtaaacttcaagacggagaagccgtcctacaagaccaagcacagcgtagagaaccccattgagaaacaggcgattttcgagaaccaccatgagcctatcattgacacccagatgtgggagcgtgtgcaggagttacgcaagcagcgcaaacgcccgaaccgctatgatgaagtgggcttattctccggcatactcttttgtgccgactgcggcagcgtcctttaccagcagcgttaccagaacgccacccgcaagcaggattgttatatctgcgggagctacaagaagcgtacccgtgactgtacggcgcactttatccgcaccgacctgttgaccgccggagtgaccgacaatctgcggaaagtcaccagctatgcagcgaagcacgaagcccggtttatgaagctgctgatcgagcagaacgaggacgggggcaagcgcaggaacgccgcaaggaaaaaggagctggaagccgccgagaagcgtatcagcgagttatccgctatcttcaagcggctgtatgaggacagcgtgaccgggcgcatttcagacgagcgtttcacggagctgtcggcagactatgaagccgagcagaaagaactgaaagagagagccgccgctatccgggcagagctttccaaagcgcaggaagccacggtaaacgcagaaaagtttatgaatgttgtccgcaagtacaccagctttgaagaacttacccctacccttttgcgtgagtttgtggagaaaatcgttgtgcatgagtgcagctatgacgagaacggcacacgcagacaggacattgatatttattactctttcgttggcaaggtagacctgcccgaatgaccgcccgacctatccggcgcaatgcgcaaacgccggataggaacggcaaaattttttacacttctactacttctttatcacacatcagcaaagtctcagggcatcaagcagttcatggctaattaaagggaacaaaaagaaagggaaagcacaatccagacggtatcagcgacaggctacaagaataaattgtgatttcacaagattggtgctataataagagaaaagttcctgccggggcagccaccccggtggtatggatagaaaggcaggaaaacaatatgcacatcagctataaaccactctggcatacactgttagagcgtgatatgagaaaagaagatttaaggcttgccgctggtatgacaacgaatatgattgccaacatgagcaaagagggaaagcacatcagcatggacacattagcccgtatctgcgaaacgctgaattgtgagattaccgatgtaattgagttagtaccagacgagcctgcttccacaggaggtaaggaacatgagcgaattaaaaccaagaataacagaaaacggaattgattatatccttgttggagattactacatcccagacttgaagctgccggaagaacaccgccccatcggaaagtacggacggatgcaccgggaatatttaagagaagtccacccagccagattgaacacattgaccttgaccggggagttatggacataccttgcagacctgaacgaacaggcacaggaacggttagacaccatcatggagcagatgaaagctgccgagggcgtgaccgaggaattgaagcgtacccgtcaaatggaatgggtgcagcgttgcaataacattcacaaccgagcagaagaaattattttgcatgagatggtttattcataaacggtatgtcagaatgacaattacaaactgaaagctgaaggagaggaaatttatgaacaaaaccttaacccatagtatgaaatcctatataacaatttttttggttggtattttagtcggatgtatttgcaggcttacagattattgcccagctgatacattatggagtttttcgtcaattcaaacactattgggattttggattattaccaataccatcattgttttagcaagtacttcaaacatttgtgcagggattagttcgtttttatatatgtttggaatgacattgagtttctatggattacaagcaatattaggaacattcatacctttattttctggtggttttcgtacttcactatttatattatttactatttgttcaatcccttgtgcaatagcagcgtttatcttatattactggaataaagaacatatttttaattctatattatattctctgccagtaggtgctttagccgcagaagcaattgtaatttttatttactttttagggcatcatacattcctatttcagttattgatggatgtaataggagtgctaatttttcttttcatgttctataaaaaagcaaaaagtaagaagctttttctaatcgcttcggtaattagtgctttggtattttactttgtttttccatggtaatatgaaattataatatacaacttaccactctgaaaacttaactgaataaccataacacaaaccgctgctacatggaagccaacaaaccatgcaacagcggtttttctttaccgttttttcctctggctgataggcgttcccattttctttgactttttgagaatccgaatcagccagcgaaattcttcgtctgacagatttttatagttgataccgagctgcttgcagtaaagtacaacgagcttttcatcccggctgcccttgaaattttcgaccgcttccagattttctttcagttcatcagcaacggtggtctggggtgcactctcgctgtcctttttatgggcttcccgaatatcccggataatgaggttgaggtcatccagaaccatgtggctgaaatattcatcatcgctgatatgggcggcttgcagtactttcaaatgggggtcatcttcgccggggcgataccgttcaatgatttcatgccggacggtatcgacaagggcgttgaggttctgaatctgcatggtggcaatcccatccacataaatctcaatatctgcaagaaacttgataaaatccttatgggtggcaagttcgcagagcagacggttgttaatccgaccgcttttcagaagtgctaccatctcatcactcaaatgcagctcccttaatggcgtgttgatctccgcccggttctctgtccggcaaaagagataatcgagggacaccccataaaaatctgccagcaggataaggttgccatgattgatttccttatagtcgtctttttcataactgccaagagccgattttgaaatacccgtttgctcagccagttcttccagttttaatcctttgtttaatcgtaaatcttttagccgttcctgtattgtagtagctccgttcattgaagcagttccccctttctaacgacatttataaccgttgaattgattataccatatcaattccgcaatcgtggaaatttctgatttttacccctgattcctactttgtggacatacggcacagggcacaaaaatgttctatgatacaggtagttcatcgatggattattccaatcgaatgaccagcctgtgtgggatatgcttccccggcgatgtagcgccatgactttttggcagggatatggaggaaccctgaccaaaacgagcgtaccaacgggagcgatacgccgctgtgagattcaggggaggaacgacaccggggagaactggcgaactgacaccgaaatgataccgaaacacgacaatctgatagggggatagtctaccctatcgctaatacttcgggagattttaagcggctctatggctgtaattttgccgaaaatcgccccgaaaccatacacgaaaacgggaggaagcgcaatatgccgagaatgagcaaaaagaggaagcatgagctttccttttacctcaatgaccgggggcgtgtcacttacaacgaattatgccggaaatgccagcatgggtgcaagcagagcttccgggcggttgtgattgactgcccccattatttatccaaacgagcaaacaaaaaggaggaacacaccgaatgaattttgaatttatgacgatagacacaccattgccgccctgtatgccattccccagagcgttgacaggatttccagtcagcagcaccgcaaaggtcatgtattgccggatgctggacgctatgctatccaaagggcaggaggacgagaacggaatcctgtttgtctgcttccctgttacagccattgccgcagtcttgtcccgcagccccatgacggtcaagcgttctttgaatgaactggaaatcgccggacttatcatgcgggtgcgtcagggagttggagaaccaaacaggatttatgtgctgatgccgggaaaggaggacgctgcccttgcctgatacctcaaagctggaaaagctaaaccagaagctggagaaaagcgaaaagaaactgcggaaagccatcaatgatgaaaaggcattgcagcaccagttaaagcagcttacccgaaaggaacggacgcaccggctctgtacccgtggcggtatgctggaaagttttctgcaagagccggaacgcctgacagatgatgatgtcatgctgttgttgaaactcatttttcacaggcaggacacgcaggaactattgaaaaaactgctggaacgggagaagccggaaatcccttagtttactaagggcgcaattatacaccacccagaggttggtgcattgcgttctccgaaggctcctcgccggagggctgagattttccgcagtcatggtctgctccaaatcaaacaggggacgctacgcttcccctgcgctggctaccgccagctacccttttgtggacttgccatctggggacaccttgcgttgcaagctgctcccagccgacaagttttacaaaatctctctgtactttgagggtcgaataaagtataatgaagtcaatgagaaatcgggagttggaggtattcactatgaaaaagattataaccgtaacgctttgcattgtgctggttcttctctttgccggatgcggaaagaacggtgatacatcaaaagtggaaattgattatggagcatcttccgtttattcaaaagaagaaatagattctgccattgagattataaaaaagcagttcgcttcgtttgagggctgtgaattgcatagcctttcttatatgccggatgaagaatgcaacaatgcagataacattgaatggatgaacgatttaagaacggatgataataaagaagcctttacgcaatgtattgcatttgaaagcagttttcgttcgccgaaaaaaggtggcggtgcatgggaggctaacgaagaatacacttggtcatggtggcttgcacggagtgaaggcggagaatggaatctgatgacttggggttattgataagagtagaaaattctaagttatggaggtatatattatgagagtaatgatttcaatcattcttatggtaattgcggcggtggtcggttttttctttggtgctggaatgaacgaagcaatgggtggagcaatactactttcaatgattacaggttttgcttgcaccattagtgctattgaaaagaacaagaaggactgacaacttcaagtttgccactcacacatcgggtcaacttgctcccgaacttttacaactaaatatccgccgcccacaaagcggcacaccaagcaggaaatctgaaaaaggttgcctgctttttttctgcccaaaatgaggtggtaaaacgccaccccatccgccaatcacagaaaggagtgacacgaaatgccctgtccacacaacgaaatttctattgtgcggcgaagccaacagcagtctgcggttgccgccgctgcttaccaaagcggcgaaaagctgttctgtgaatacgatcaggaagagaagcactacccggaaaagcgtggtatcgtccacaatgaaatcctgctcccggcaaatgccccgccggagtatgcagaccgcaataccctatggaacgccgccgaagcggtggagaagcagtggaactctcagcttgcaaggcggtgggtgcttaccatccccaaagagataccgcccgaccagtatgctgtccttgtccgggagttttgtgaacagcagtttgtttccaaaggaatgattgttgactttgccatccatgacacccacccgccgggacacaatccccacgcccatgtcctgttgactatgcgggcaatggacaaacatgggaaatggcttcccaagagccgcaaggtttatgaccttgacgagaatggggaacggattaaacttccgtccggcagatggaaaagccacaaggaggatacggtggactggaacgaccagaagtattgtgaaatctggcggcatgaatgggaggtcatccagaaccgttatctggaagccaatgaccgcccggagcgtgtggacttgcgttcctatgccagacaggggcttgatatagtccccactgtccatgagggagctgctgtccggcagatggaaaagcgaggtatccagacgaatatcggcaacctgaaccgggaaatcagagccgccaacagtctgatgaagtccatccggcagcttatccaaaacctcaaaggctggattaccgagctgggagaaaaacggaaagagctgcttgcacaaaaagcggcggaggaagcgacacttcttcccaatctgctgatgaagtacatggagatacgaaaggaagaacggaaggactggacgagggctggacagaaccgggggacttcacaggacttaaaggcagtcagcgaagccctgtcctatctccggcaaaaggggctttccactgtggaggacctagaagcgtttctggaatcttccgggaaatcagccgcagattaccgcaatcagatgaagccaaaggaagcccgcagcaaagtgattgacgggattcttgccagccggacagactgcaaggaatgtaagcctgtctatgagaagtaccagaagatatttttcaagaaaacaaaggagaaattcaaacaggaacacccggaggtcgcccggtatgcgaaagccgccgcctaccttgccaagcacccggacgataaggacagcacccaaaaggaactgcaacaggagcaggaaaaacttctcagcgaaatcgcagagctgaaagtaccgctgacagaggtgcaggaggatttgaagaagctgcgggatatccgctactgggtacagaaagccacccccggcacagaggaaagcaaagagccgcccaagaagcagcccatcaaggaagtcttgcaggataaggcagacgagaaaaaagcacaaagaactgcccaggaacagacgaaacacagacaacaggatatggaactttaacaggcacttgccattttcaatcagagaatgtcaggtgcttttcttttttcaaggagggatagatttgaatgtatttgaagctgtgaagcagtccgtcacaacaagacaggctgcggagcattatggaatccatgtaggtcggaacgggatggcttgctgcccgttccataacgataaaaccccaagcatgaagctggatcggcgttaccactgcttcggctgcggtgcggatggggatgtgattgattttgccgccgccctgtatgggctgggaaagaaagaagccgccgtacagctggcacaggacttcgggcttccctatgaggactggaaaccgccgggaaaggcaaaaaagtccaagccccggcagaaatccccggaggaacagtttcaggaagcaaaaaaccgctgcttccgtattcttaccgattatcttcacttgcttatggcatggagaacggactacgccccgcactccccggaggaagcctttcatccccggtttgtggaagccttacagaagcaagaccaagtggaatatctgctggatgtgctgctgttcggggagacagaggaaaaagcggctttgattacggactacggaaaggatgtgatacagcttgaacagcgaatggcagagcttgcagccgcagacgcagcaagaactaaaaaacaccatgaacgccatgcagccgccccagagcattgaggaaatcaagtcggggctggaaaccaccgagaaaggcggtgtccgtcagagcatacggaactgcctgaccgtattccagcgtgaccctctgctttccggggctatcgcatacaacatcctaactgaccgcaaggacatcataaagcccatcggcttccacagagaaagcaccgccctgaacgatacggacatgaagtatctgcttctctatctggaagaaacctatgggcttaccaatgagaaaaagattgataatgccatcgggattgtggcgaatgaaaacaagtaccatcccattcgggactatctcaatacccttgtgtgggacgggacagaacgaatccgcttctgtctgcggcactttctgggggctgacgcagacgattacacctatgaagcgttgaagctgttcctgctgggtgctatctcacgagcctttcagccgggatgcaaatttgaaatcatgctctgtctggtaggcggtcagggggctggcaagtccacattcttccgtctgctggcagtccgggatgagtggttctccgatgatttgcggaagctggacgatgacaatgtgtaccgcaagctgcaaggtcactggattatcgaaatgtcggaaatgatggcaaccgccaatgccaagagcatcgaagaaatcaagtcgtttttaagccggcagaaagaggtctacaagataccctatgaaacccacccagcagaccgcccccgtcagtgcgtgtttggcggcacttccaatgcccttgacttcctgccccttgaccgttccggcaaccgccgctttatccccgtcatggtgtacccggagcaagccgaggttcacattttggaggacgaagctgtttccagagcctatatcgaacagatgtgggcggaagcgatggagatttaccgaagcggcaggttcaagctggctttcagccccaccatgcaacggtatctcaaagaacaccagcgggattttatgccggaggacaccaaagccggaatgatacaggcgtatcttgataagtacaccgggagcatggtctgctccaagcagctctacaaagaagccttaaaccatgcctttgacgagccgaagcaatgggaaatccgggaaatcaacgagattatgaaccagtgcattaccggctggcggtacttcccgaacccaagaatgttttccgaatatggcagacaaaagggctgggagcgtgaaaacccggcaacggactccggcaacccgtctgaaaaaacgatggatggttttgtggaggtcacagaacagatggagcttccattctgaaaatgaccgcccgttgcaccccctgttgctatcccgttgccgagccggttgccggggaaaaccccttatttccgggcttttctcccttataacaaccaaaacaacagaaaaataaaagaaaagtataaatagtaagtagtgccagattgagattgtttgcaaggtcttttgaagcccgttgccggacttcgttgccgacaccctctgtctggctattttcatgtatggaggataactgcctatggcaaaaaacaaaacagagattcatgtgactactgtgtttgacggagaactggacgccactgatgtgttcgtcagcctgatttcccagaaatacggaaagacaaatacaaaagaatatcttgctaaaaagaaagatataagctataatgaagatgaggttcaaaagagccagataccgtctggattgtgtgggtaaatggctatgatgaacgaaatggaatacagaacaatcggaaaggcacttgccgggggctatcgtgcagcggtctattgcaggctgtcaaaggacgatgacctgcaaggcgaaagtgccagtatcgcaaaccagcgtgatatgctggaaaaatactgcgaaaagcagggatgggaggttgtggcagtctatcaggacgatggcttcacaggtcttaacatggagcgtcctgatttacagagaatgttgagagccattgagcgcaggcaaatcaaccttgtcatcacgaaagacctcagccgactggggcgtaactatctgcaaaccgggcatttgattgaggactttttcccaaggaacggtgtccgctatatcgccatgaatgacggtatcgacaccctgcgtgataacaacgatattgccccgttcaagaatatcctgaacgagatgtacagcaaggatatttcaaagaaagtccattcctcttatcttctgaaagcgcagaaaggacagtttaccgggtgtcttgccccgtttggatatcggaaagacccagaggacaaaaaccatctgctcattgacgaggaaactgccccgattgtgcggctgattttcggatatgccctgaacggtcatggtccgaactatatccgcagacggctggaggaagaaaaaatcccctgccccacatggtggaaccgggaacgggggcttcgcaatacccgcaccaaatgggaaaagaaagacccggaaaacgggcggtatatgtgggacttctccgttatcaaagaccttttgatgaatcccgtctacaccggggcgattgcttcccagaaaaaggactaccgtttcaaaatcggcacgattggggaaaagaagccggaggactggattgtggtggaggggcagcatgaaccgctgattgatcgcatgagctttgacattgtgcagaacaagctgaaatcccgccagcgtccggggcagaccaatgaaatcagcctgtttgccggactgttaaaatgcggcgagtgtgggaagtcgctgacggtacgctacacaaacgcaaaacatccccagcagatttattcctgcaagacctacaatgcctttggaaagaaccactgcacccagcaccggattgactatgacaccctttacagccatgtgctgcggaaaatccgggaatgtgccagagctgccctgatggacagggaagcggttgctgaccgcctgaccaatacctgtgaagccgagcagcgggaacagcgggaagcaatggaacgctcccttacaagggacgaggaacggattgaggttctggacaaaatggtcatgcggctttatgaggatatgattgcagggcgtatcagtgagcagaatttcaacaccatgctggaaaagacacagaccgagcagacggagcttaaagcaaaagtgtccgagggcagaaagcggctgtccgatgaagtccagcttgccaatgacgcaaaacaatgggtggaagccattcaggaatacgccaacatcacagagctggacgcagctaccctcaaccgcttaatcaaagaaatcgtcgtgcatgagcgcattgacgaagataaaacaagacacatttctatcgaaattcattttaatctcaaacccatcccggaggtggaacaggtcactgcctgacctgtcccgccgggacggttctcttaacaacaccatatagattttttgtacgccgccgcccgccatcgagcagagttttacacctaattggggataaaacagctcatggcgggcggcggcatcatcgtcattggcaccacactgatccctctgctgtctggcctgttttaaggtaggcgcttatggattttctcaccgactggctcacaaactggctcaaagagcttctgattggcgggatcatggggaacctcgaaggtctttttgatactgtcaatacccaagtcggagagattgcggcacaggtagggactaccccggcggcgtggcacgccggggttttctccctgatccgacagctttccgaaacggtgatcctgccgattgccggaatggtgctgacctttgttgccacttatgagctcatacagatgcttttggaaaagaacaatatgcacgaggttgacgttgcgaacctctataaatggatgttcaaaacagcctgtgcaatcctgatcctgtcaaacacattcaatatcgtcatggccgtgttcgatgtctcgcagagcgtcatcgcgcaggcaggcgggctgattcaaggctctaccgatgtttcggcggatatgcttgccgaactggaaacctcgctggaggcgatggacttggggccgcttttggggctttggctgcagtctgcgctcatcggcttcacgatgaaagcaatggggattatcattttcgtcttggtgtatggccggatgttggaaatctatctgctgaccagtctggcccccatccccgttgctacgctttccaaccgggagcttggcggcaccgggcagaactacatcaagtccctgtttgccgtaggctttcaagggctgctgatcctcgtatgtgttgcaatttacgcagtgctcattcaaggcatcgcaacaggcggcgatcccattggggcgatttggggaactgtgggctacacggttctgctttgcttcatgctctttaagaccgggagcattgcccagcgtatctttggcgctcattaacaggaggtggtgcttatgccgagaagatacggggcagacggaacgcgcttatggaatggaaaaacgccggaggagtttactgaggcagacgcttaccgctttatggcggaaacagaggccgtcctgcaaagaaaagagttgatggacgaccccgcccagcctgctccggcaagcggaaaggaggaattttatctgagtaagaaagacgatgtattgctgaccccggagcagattgctgcggaggaacggcgctggctgtttgatgctcccatcgcggagcttgcagaagtcaagggcgttagcattgatgaggcagtaaaaatgcggacagatgctgtcttgcaggaggcggttgttccgatcacggtatctgtccgcccgattgagccgcagggaaaactgatcggcttcgccagcgtcaattttggcggtgtggtcatcgacgattttaaggttgtggacggaaaaaacgggattttcctcggcgctccctctaagcccgatcctgccagccggacgggataccgggctacggttcggattcctgaccgagccacacaggaacggatcaatgcggctggtgtggaggcgtatcatgcggcggtggaacagcttgttgcacgggcccaggcggtacggcctgccccgatcaaggagcagatggccgaggccgcgaaacaagcgggaaaagaaaacgccgcccggcctgcgcctgccaagacaaaggaggcccgcaatgaccgatagccgcactttgggacaaagtgtcccgaaggaggacttgtttctcatggacggcatcgagggcctgcgttctttgccaaaacatagcgtggatatgctgttgactgatccgccttacggcacaacccggaattattgggatgtgcccctgccgctcccggaactgtgggaggcggtgaaatgggcggtcaagccgaatggcgcagtgctgtttttcgcacagtgcccctttgacaaggtgctgggcgcatccaacctcgccatgctccgctatgagtggatttggtacaaggagcgcggaacgggctttctcaatgcaaaccgggctccactgaaaaagtccgagaatatcttggtgttttaccagaagtccccggtctacaatccgaagtttacttatggcaagccttatgcccgcgtacattcccgaagcggtacaagctccaactatgggaaatttgaacggcaggaatcggagtccaacgatggccgccgctatcccggaaatgtactatttgtgcctacggtgtccggcggcatccatcctacacagaagcctgtggagctttgtgagtacctgatccgcacctacacccgtcccggagaactggtcgcggacatttgcgttggctccggcacaaccgcgattgcagccatcaacacagaacgccgctttgtatgctttgaaacggccccgtccttttatgccgccgccagtgagcgcatccgtgcggcgcaggcagtaaaaagctccggcgagaaaggagtgtaattatccagcagtattctatcatttacgccgatcccccttggcgctactcggctaagaaagtacagggcgcggcggaaaatcattatcccactatgagcattgaggatttatgtgcgttgcctgtggctaatcttgcagccccggacagcgcactctttttatgggccactttcccgcagctcccggaggcgctccggctgatcgaggcttggggcttcacctacaaaagcgttgctttcatctggctgaaaaagaacaagaaggcggatagctggttttacggccttggcttctggacaaggggcaatgcagaaatctgtctgctggcaaccaagggacatccaaagcggcaggctgccaacatccatcaatttatcgtttccccgattgaggcccacagcaaaaagccggacgaggcccgcgacaaaattatttccctgatgggcgatctgccccgcgtggagctctttgccaggcagaccccgcccggttgggctgtatgggggaatgaagtaacaccaaccatcccggactttgggacacattgtcccgaagtgcagaaaggagtgtgatctatgccctatgtaaacgtaccaaacgatttatccaaaatcaaaacaaagatggctttcaacctcaccaaacgccagcttgtctgcttcggcagcgcgggcgcggtggggattccggcttatctgctgacccgtggcaccctcggcaataccggggcgatgtttctcatgctgggaattatgctcccggcgttcctgctggcgatgtatgaaaaggacggcttgccctttgaaaaggttgtgcgaaacatcatccgggccaagtttctaaggccggggatcagggcctaccgaaccgaaaacatttatgcgccctttgccgggccgggtgctggaaaggaggatgtgattgaaaaacacaaagaagaaaaacggagccgccgccaagggtaaaggccgggcgaccctgtctgcccaacagacaatcccgtatctgtccatgcacccggacggtgtgtgcaagctcccgggcgggctctatacaaaaaccgtggaatatgaggacatcaattactccgtggcatccaccgaggatcagaccgccatattcagcggatggagctcattcctcaactactttgacagttcgctgccgttccagctttcctttatcaaccgccgttctcattcccgcagccgctatcaagtcaatatcccgaaagcggatgacaactataacagcgtccggaacgagtttaccgggatgctgaaaaatcagattgccaaaagcaacaacggtattgagcgctcaaaatacatcacctttggcatacccgccgaggggattgcggaggcacggccccgactggagcgtgtggaggctgatgtcatgggaaactttaagcggctgggcgttccctcggagcctatggacgggcgggcccgccttgcgctgcttcatagccagatgcatccggggagccgcgaggcgttccgcttttcgtggaaagacattccgcagaccgggctcggcacaaaagactttattgccccggacagtctcgacttccgccagtcccgaacattccgtatcggccagtattggggcgcggtgtcctacttgcagattatggcatcggagctttcggataagttgctggcggaaatcttggagctggatgcggaaatgaccgtgaccatgcacattcagaccgtggatcagctcaaggcaattaagaccatcaaggggaaaatctcggacatcggaaaaatgaaagtggaggaacagagaaaggctgtgcgctccggctatgacccggatattcttccccctgacctgatcacattcagcaaggacgcagcggagcttttggctgatttgcaatcccgcaatgagcgaatgtttctgctgacctttacggtggtaaaccttgcttctaaccgccagcggctggaaaacgatgtgtttaccgtgggcggtatcgcgcagaaatacaactgcgctctgcgccgtctggactggcaacaggaacagggctttgtttcctcgttggcccttggttacaacgaggtagaaatccagcgcggtatgacaaccagttccacagccatctttatcccctttatgacaagggagctccgcatggcggggcaggccctctactatggcatgaacgcactttctcacaatgtcatcatggctgaccgcaaaaagctgaagtcggcaaacgggatgtatttgggttctacgggctccggcaagagctttgctgcaaagcgtgagctcttgaatgtgtttctcaccatcccgcaggatcggatcatcgtggttgacccgatgggcgaatatgcgccgctggtgcgaaggctgggcggccaggtgatcgagattgccccggacagcccgcaccacctcaatccgatggatgtggagctcaatatggctgccggagaaagcccactttccatgaaggcggattttcttttgtccctgtgcgagctggtggttggcggcaaggaaggtttgcagcccattgaaaagacggtcattgaccgctgtgtgcgtttggtgtatcgggagcaggcgctcggactggaaaccgcaaaaacaccgctgttgcaggatttatatgaggaacttttacgccagccggagcccgaggcccggcgcgtggcaactgccttagagctttattgcacaggctccctcaatctttttaaccatcctaccaacgtcaaaacggacagccgtgtagtgtgcatcgttctgaaaaacatgggcgaaaatcttagaaagattgcaatgcacatcacaaatgaatttgtttcgcaggcggtggatcagaacttccacgagggcgcggcgacttggtgctactttgacgagtttcatattctgctccgcgatccgctgacggccagctactttgtagcggtctggaaaatgctgcgtaaaaaaggatgtgtgccgtctgctttaacgcagaacgtcaaagaccttttggccagccgggaaatcgagaacattctggataacacggattttatgatcctgctttcgcaggcgcagagtgaccgtaccattctggcaaaacagctcggtatttccgagcaccagctttcctatatcacacacagcaattccggcgagggcctgttgttctatggaaatgtgaccatcccgtttgtggatcggttccctcgcggagaaatctatggcctgctgactacccgcccggaggatatgaagaatgaaacgaaaaacgaataaggccaaggaggaggcttggtcgcagatcgcccacgcccctgacggggaacagcccgggccggaggcttccgacacttcgggacaaagtgtcccgaagtccaagttccgcaaaaagagccagcaggaacaggctgcggcggcaaagctccacatggagtcccaaggcgaaaaactggaacaggcccgggagaagctggcaaagcaaaagccgccgaaaaagcccggcccggtaaaacgcataggccgtgttgccagtggttccgttcacagcttcgtgcatggcaagatttttgaagtggaacaggaaaatgtcggcacagaaggcgcacaccgttctgagcttgtgggagaaaccgcgctgcggcacggctcccgctttgtgcgccgtaaagtccgggaacatccggcaaaagtggtacgcaaggccgaggcccgctataccaaatacacggcggactaccattttcacaccgccgcacaggagcacccggagctgacgaaaaatgcccttacccgctactggcaaaagcaacggcttcgcaggcaataccgcaagcaggcaaaggaagctgcaaagcagggcgcggctgcggctgggaaaactgccacagccacagagcgcctgatcgcccgggcagtggaatttgtcaaaagtcatcccgcaggtgccgtggttgcggtgctctgtgtgttactcctgtttgctatgcagtcctgttcctctaccatgcttatgctggggaacgccggggccggtgcattaggggccagcacctatccttgcgaggatcgggatatgctggccgccgaagctgcctactgtgcgctggaagatgatttgcagcattatctggacacctatgaaagcacccatgactatgacgaataccacttcgatctggacgaaatcgaacatgacccctatgtgctgctttctcttttgtgtgcgctccatgaggggcaatggacaatagacgaagtacagggaacgctgcaaatgctgtttgaccgccagtacattctcacggaggatgtagtggtggaaacccggtatcgcacggaaaccgacacatggacggacgcggacggcaactcccatacggacacctatcaggtgccttacgactattacatctgtacggtcacgctggagaactttgatttatcccatgtgcccgtatatgtcatgagcgaggagcagctttcacggtatgccatctatatggcaacgctgggaaaccgccccgatctgttcccagattctccctatgtgaacaagtatattaccgggaaacccggtgattacgaagtgcccggagaatatctggacgatgaaacctttgccgcgatgcttgccgaggcgcagaaatatatcggctatccctatgtgtggggcggcagttctcccgccacttcctttgattgctcgggctacgtttcgtgggtcatcaatcactccggctggaatgtgggcaggctgggagcccaagggctctataacatctgtacgccgaccagttctccaaaacccggtgatctggtgttcttcaaaggcacctatgatactccgggcgtgagtcattgcgggatttatgtcggtgacgggaaaatgctgcattgcggagatcccatcggctacgcaaacttgaatacaagctactggcaatctcatttttacgcctacgggcgtttaccgtgacaggaggttttgaaatggcaactaccaaaagcatgaaaattcaggccgagattgataaggtcaaggccaaaatcagtgaacagcaggcccggctcaaggaactggaacagaaaaagctggaggcagaaaacagcgagatcgtggacattgtgcgcggcatgagcatttcccttacggagctcccgctgctgtttgagaagctgaaggacggtggtactttgggacaaagtgtcccgaagtccgaagaagaaaaggaggaaaactgaatatgaaacactttcgtatgttggcggcggggctttgctccgccgttcttttatgcggctttgcaatcccggcctatgcctattcggacggcgggaatgaggaaccgcctgttgtggaagaaactccggccccggagccagcgcctaccattaccccgggcgagggcttttcggaggatggaaaccttgtgacccgcgatctgctctacgatgccgcaaccaacaaacagttcatcacggtggaaaccagcggcggcaacaccttttacattgtcattgactatgacaagcctgtggacgaggacggcgaacagtatcacacatactttttgaacatggtggatgaagccgatctgctggcggcactggaggccgctggcggagaacttccggcctgctcctgcacagaaaaatgtgcgcccggagccatccatacggattgcgaggtctgcgcggtcaacatgaccgagtgtgctggcacagctcccgaacccgctccggtgacggaacctgcggaggagccggaacccgagccccagcagaaaagcaataccgggacgcttctgctgattttggcagtggctgttctgggtggcggtgcaggctggtacttcaaaatttaccgcccgaagcatgaaaaagctgctgtacccgaagaagattacagtgaggaactggctgattatgacgattccgaggacgatgggccgccttgggacgaggacgataccgaaagcgaggataatgaatgagatttacaaataacccctatgagggatttatgaaagaaaaaagctactttaagggtatgccgcccagcctgccgccgaagggctcccgttgtgacggctgcccttactggcgcgggattggctgcgtgttctgctaccgggagcagctcaaaccaccgggcaacgggaggtgatgctgtgggccgagaactgacccggacagaaaaagcggcaatccgcaggctggtgtcaaaatggtgtgccaactatgaccgggactgcggctgcctgccgctggattgcgagtgctatatgtttggaaaatgctggacgggggcttattgccgctacttccgcgaggcagttctgccccttgatccggcgctggaggctgcgttgctgacagaggggccaaggccggatttcaagacttgcccggtatgcggcagagccgtggctcctgatggacggcaaacctattgttcggcggcctgtgcaaagacggcacaccgcagacagcagcgggaatatatgcgaaaaaagcggggctgatgtgttgacaattaggacaccccaaacccgcctgtgacaaggctttttaaggcccttttctgcgggaggcgtatgtttctacgtccgcccctgttttcgtgagatgctgtcaacattttagctgccggggctttgggacaatttgtcccaaagttccggcttttgtggaaggaggtactatgccgaaatattatccgatcaatgaagaagccgcaaagcgggcaaaagatatgaacagcttttctgactatcagccgggctccgctacggcgggctaccgggcaatggtcgatgaagcgtatgcagcggcggaacgccagaaagcccgtgtcgatcccatgtaccatgataagattgacgcgctggtggatcgctatgcccggaaacttgcggaaaatctgaatgaacgcaatgtgattgatgcccgggtgccctctattctgatctccgggggcggcaatttccctgtggcaaaaaagcacaagcagaacgccgcccgggatcgcaactatggagagtatgcggagatttcaaagctgcttgataaaatccgctctgttggtatgggcgggatcagcgccgacgatgatctggccgtggaaaagctgacaaaaaagctggaggggctggagtcccagcaagccactatgaaggcggtcaatgcgtattttcggaaacacaaaacgctggacggctgcccggagcttacgccggagcaggcagaaaagctcaaagcagatatggcgcagtcatggcacttggataaaagcaagccgtaccccgcctatctgctttccaacaacaacgccaacatccgccgtgtacgccagcgcattgaggaactgagcagccgctccgagtttgctggctggacattccccggaggcgaggccaaaatcaacgaggctgaaaaccgtttgcagcttattttcgaggaaaagcccgatgccgatcagcggcaggaactgaaaagcaacggctttaagtgggctcccagccaaggggcatggcagcggcagcttaaccagaacgctatccgtgctgcggcccggatagactttctacggcccgaggacggtacaagcccctatcagctccagccgtttgtgaaaagagaaaacaaagaaatgtctcgatgatgggaggtgtactatggacaaaaatcaaggctattcgattctgaaggctgttatgctggaaaatggacgtggatttgcattgggcgaacatcccaccgcgccatcccgctatgtcacatgggcctgctatgatgacaaggacggccagcggcagtacgaatggggtcactatggaaatgaccgtgccgcgatggaacaggattttgcagaccgggtgcaggactatcagcgtatttataacgtggggatcaggcagaccgaggctcccggtctttacaagtattattcgacccagcggcctgtggacatcgggacattcccgaagccgccctataacaagccggatgaaatcttcaattacgatcagcgcatcccggtggaaaatggctcgttcttggcttggggctatcttacctatacccgtccgctgacggaaaagcaggcatccgactatgagttgcgtcctgcgcctgataatcccgacaggccccgtccgattgccgaacagatgaaaaacgcggcaaagttggcggaggcagatcgcggctcggaggctccggctccccagcgcaggcagcctgaccgtggtgatagataaggaggtgcgtatatggaaaagaaacgtgaacaggatttgtctgtactggaggcgctgcgcctgcaccgtgaatttcatttgccgcgccctgttccggtagacgaacaggaaaagccgctggataaagtaaaggagccgccccgcgcctgccgcagccgggagcgtgaggagcgatgacaaagaaacgccgccgtccgatccatcttcatgtgatggtgtcggaggcggagcaggccctgattcaagaacgtatggcggaggctggcatccgtaacatgggagcttatatgcggaaaatggccctgagtgggtatgtgcttcatgttgacctttcgcctgttcgtgagctggtttcgcttcagcggcgatgctccaacaatctgaaccaagtggcaattcaggccaacacctacggcgcaatttatcccgaagaactcgcagccttacagcgggactatgccgcgttgtgggggccgctgtctgatctcttgaaacagctctccgcgctggtagagctctgacccgtccggggagtggttgataccgctccccggttttttctacttcgggacaaagtgtcccaaagtaaaaatactatttgccggaaggagggatttctacggcgacaacctacatccgcccttataaaacagcggcgggaaaaagtgcaattcaaacgatggaggatcgtttcacctatggcctgaacccggaaaagctgggagccgtatcttcctatctctgcgatccgaacacggctcccgccgagtttcttctggtaaaaagtcaataccttgcagagacaggccgggccgtgtctcgcggggccctgttctttcagatccggcaggcgttcctgcccggggaggttacggcggaagaagcaaaccgtatcggctatgaaacggcgatgcgctggacaaagggaaagtatcagttcttcgtctgtacgcataccgacaaggcccatatccacaatcacatttatttcaatgcgacggcctttgaccgctcccggaaatttcataatttcattggttcgtcctttgccctgcggcggctctctgaccgcgtgtgcatcgaacatgaattgtctgttatccaaaatccgtgccagcacagcaagggtcgttttctccactatggacagtggatcggagaaaagccaccctctgccaagcagcgggtgcggctggctgttctcgccgctttggagaaaaagcccacggactttgccgactttcttcgtctcatggaggagtccggctttgcggtgaaacatgggcagggcggtgtcatctcattccttgcacccgggcaggaaaaaccgacccggctccgggcttctacacttggagttggatttgacccggaggacatcaaggcggtaattgccggggaacgtccactccccgaactgcccgaggagcccacggttccgccacggcgagttaatctcatcatcgacattcaagagcgtatggcccaaggcaagggcccggcctatgaacgatgggccaaggtctacaacctaaaacaaatggccgccgcgctccagtatttgcaggagcatcatctgacagactatgcggcactgacggccagcaccgaggctgcggtggatcactttcacaagctgtctgacgagctccgcacaacggaggaggctatttccaaaacctcggagctgatggctgccacggtggactatgccaagactcgcccggtgtttgatggatacaaagctgcgcggtacagcaaaaagtatctggcccagcacgaagcggagcttgccacttaccgggcggcaaaggatactatgaacaccatactgaacggcgcaaaactccctaagattgaagcactaaaaaaatcccgccgtgagctggcgggacaaaagaaagcgctttatgcagaataccgggaggcccagcggcaaatgcgggaggccgtggcaataaaagcgaacattgatcatctgctcggcataacagacgagcgtgaaaataaggcccaggaacgatagtgacgggccgcagactacggtgcaacgcaccgggactttgggacaatttgtcccgaagcacagcgggtttggggagctccccaacaagcatttttgcgggccctgcgccctgcaaaaatttcggagtgtggccacacccgaattgcttgccaaaacgcgcaacccgcaacatggcgcaaaaaacggaggttacgctttcttttacgtttcctccgtttctttcgatgctttcatcgcttggattgtagcttcaacgattttcaattctctttcgtccaaggcgttcaacatggcatcaatccgctttctgcactcgctcccgctattttgggacgggtaaaagtattgatccaccgatatatcaaacattgtgaccatctgataaaaggtgttgaggcttggatgctggccgtcattttcgttatacataatggtacgcggagcgcggtcgacaatataggccagttgctcctgcgtcatgccgctggcttctcttgcccgcttgatggcgagccctatatcgtgaaaatcaaagcgtctttcatctcgttctatcttcataacatcacctgatatgattttacatttcatgtgatattatttgaacgactatctatttcatactactgactatttaatttcactacattttataattcagcacaaaatcagacgagcgccagagtaaactctggcgctcattttactttcgttgtgcgttttttctgtactctaatggtaacaatccagtgcttttgcggaataattctgcaaatcggcttgaagtggaataacctactgtttgggcaacttgccctactgtcaactctgtgtatgccagcagatattctgcttggctcatacgcctctgctgaacatactctgtgatggtgcagtcgtagtatttcttaaaacagcttttgagctttgttgttcccatgcaggcaatctgtgttagccgttccagaggaatatcaaaagcatagtggtcgctaagataagcggcaactatttgaagattttcaatatcctgttgagagagcttatgggctggtttatcaggatgtttcttctgatattccactaccattgaaactgcttctgcaacttttccctcataaaaaagttttgcggcaatcccttccccacgatagtccttgatttctgtgagtaaccgtgacatttctggaaagtcggaagtttggtcgatcttccgaaatgcatccacaggattgatctgtgcctctgggtacagttttttcaggtagtcctcataatatgccggtgcaatctcaatcccaaccgaacggattggaatatttttatgtatcaaagccttgtatggagcgtagcctccaataaatgttttgatataaccggcagacagtctacggtatggagataattcctccccggaaatagagtcataccgagtgatactcagacattccggcatggagcattccaacatgaaatcttcgtggaaggaaaagttatggattttaatatcatacaagtctttctgtccataagtccagtaggtgccttctccaacttcgggagaaagtttccagcagtcacctaatgccccatattgctggttgtctgggtcatggataaaaccgtgttcaatcagcaacggtgtataaaactggtcaataatttcacacatgaaaacagaccgcctcctttttgcaacgattagacgagcttttgaaaggaacagacgaacatcgccgggacctattgaatgttgttcgataaatgcgtattgtattagacagtggttagaactatctaactgcagaatatcacaaaccatttgtcgagtcaagacaatgaaaggtaggaggtcaaaatgagtaatcaagtaaattctatgaacaaaggtctgacagtgaaagaccttgtaacaacaggtatttttactgcactgttatttgtttttgtattggtgggcggtgtcttttttgcaacgaatcctgtacttacttttttcatgccagcaggaggtgggctgcttgctggccccatttatcttttgctgattgcaaaagtacataagcgttggagcctttctataacgggcattatcatgggtattatttggttcgtgaccggtatgcactgggcttttgcattgggctacctgatcatggcgattgtcgcggacttcgttgctggtgcagggcagtacaaaagcaaaaaactcaacagcctgtcttatatcctgttctctctcggcggcactggttcgtatatcgtgttctttgttgaccccaacggctgggcacagactatgctgggaaacggaactgaacagagctacatcgacaccatgcaggcaactgcaaataccggcatcctgattgccatgttcgctgctgttatcattacatctgcaatcagcgcttttgtaggctgcaaaatgctgaaaaagcagtttgaaaaagcaggtattacagcatgagcggtaaacgccacaagaaagggctttggctcgacccacgggccaagctctttcttattcttatatgtgttttatcgtccatgttcgctccttcacttgcatatcaatttgtccttgttatgctgattgcgatattgggtgctttctttggaaagtggaaatatgtcattaaggctgtatgcttttatgcggtcatctgtgtcctgacagtttggatcatggcagaaatgacaggcacgctgcggacaatgtttattgcctttttaggattgtttcataaggtctatgcgtgcggaaccttggctgggattgttctgactactacaaaagtcaatgagttcctgtctgctatgaaccgtgtccacgcacccaaaaagttagtaattcctatggcagttatgctgcggtacattccaactattcaagaggactggcgatatatcaaggacgctatgcggatgagagatgtttcaccttctctggcgggctttttagcacatccgggcatgacggttgagtgtatttatgtgcctttgttgatggcagcttcaaaagcagcggatgatctttctgttgcttctgtcacccgtggaattgaaaatcccaatccacgcacctgtcttgtccagataaaatgcggagttgccgattggggtgtcatggccgttgccgtagcttatctgatttttgaattatgtgtgcggggaggtgtgattggttgattgagtttgaaaatgtatcgttttcctatacggggcaggaacatggtgggctgcatgacatcaatttgaaaatttcggacggagaatgcgtcctgttctgtggccgcagcgggtgcggaaaaacaacgattacaaggctggtgaatggactgatacctcagttttatcagggagagcttcatggccgtgtgctggtagatggtcaggaaatcagcaatatccctatgtatcagattgccgctaaggttggctccgttttccaaaatccacggacgcagtttttcaatgttgatacagacagcgagattgcctttggaattgagaacgaggctcgtcctccacaagagctgatagagcgagtggaacagacagccgacgatctgcgtattcaaaagctgcggaaccggaatatttttgagttgtccggcggtgaaaagcagaaaatcgccttcgcttctgtttatgccatgaacccacagatttatttgctggatgaaccgtcctccaatttggatatgacttccattcaggagttgagagagcatttgcggctgataaaaaagcagggcaaaacggttttgatagcagaacaccggctgtactacctgatggaactggccgaccgaattgtttatctggaaaaaggagaaatcaaagggatttataccccggaagaatttcgacagctgtcggaacaggagcgtgaacgcatgggcctgcgggcagttgatcttcgggcggtgttcccacctaaaccccactcgattgcccctatcccggtattagagctacggaatgtgacgctccgttacaagaagcgaaccattttgcatgatattggcttatccgcaggaaagggtgaagtgattggcgtggtcggccacaatggagccggaaagactacattttctcgcgctctctgtgggcttcacaaagactgcgatggacaatttttgtgggaaagcaagccgattgagcgtaaggaaaggctgcaacgctcttatatggtcatgcaggatgtgaattatgagcttttcgctgacagcgtagaagcagaatgttcctttggcatccgaaatccagaccaaacgctggtaaatgcaactttggaagaactgggactttccccatatcgagaacaacatccaaacacgctttccggcggtcaaaagcaacgagtagctgtagctgtcagcatgatttgtgggaaagacttgcttgtatttgatgaaccgaccagcggccttgactttgacagtatgacgcaggttgcaggattgatccggcgattatccaatatgggaaaagtcattttcattgtcacccacgattttgaatttgtctgccgtacctgctcacgtgtcctgcattttgacgagggagaaatgcccgatgatgtaccagttacaatggatgccctcccgaaattgagagagctgttctctgtttcagatggaaaggagaggtagtctatgaagcagaaaaaagaaaacagagtagcactgctgctccattgggccggaggccagaaaatctggctgttcctggcaatcctgctgtccatgtgcagtgggctttgtattattgttccgtatattgggatttacaggctgatggatgccacatttaacaatgcctgcacaaaagaacttgtggtacagactgtggcaatgattgccgccgctgttaccctgcgttttgcattattcggctgttccggcgtggcagcccataaaggcgcatacggcgcactgttcaaagtgcgctgcatggttgcggaacacatggccagagcgcctttgggggccttgaatgaacggcgcaccggggatataaaaacggttctgaatgaagatattgaaaagctggagttgttcctggcccataaccttcctgaccttgtgtgctatctggttgggccggtagtcatctttatttacctgatgaccgtcaatattcctctggcattgatttccctggttccgctgatccttgctgttgttgtaatggggatgatgttccgcaataccgatgatttgatggaacgggccaaccaatccattaccacactaaattctgttatgatcgaatatatcggcggaatgaaattgattaaagcctataacatggggagcaaatcgtttcaaaagttttcagacgctatccaggaagaaaacgccatgtggaatgaaacttcccggcgcatggggccaccttatgcggcctttgttgttatcatcgaatgtgggatgttgctgatggttccaatcggcggaatgtttttcctcaaaggctcactggcggccagcgcatttttgctgttcgtctatgtaggttccatgtatctgacggaaatccgccccctgcaagaactggggactaattttgctaatgtactgaacgctgttaccaagaccaaagaaatcctggatattccgatttatgagggtggaacggactttccccaaaatcacgatattgaacttcgcaatgtccgattttcctatgacggcaaaaccgatgtactgcatggtgtcaacctcaaaatcaatgatggtgagcgcatggctcttgtgggccgatctggtgccggtaaaagcactgtgattgaactgatttcccggttctacgatgtgcaggaaggagaagtgctgattggcggcaaaaatgtcaaggagcttgactacgataccattctgaaaaatatagctatcgtatttcaaaagaccttcctcacccgtgacagcgtgctggaaaatatccgtatgggtagtaacgctactctggaagaagtgcgggctgccgcaaaagaggcacagattgatgactttatcatgtccctgccggatggatatgacacaaaagtgggcagtttcggctcccgcttctccggcggtgaaaaacagcggattgcgattgcccgcgcaattctgaaaaatgcacctatcttgattttggacgaggccacaagtgcctctgacccggaaaatcagatggagattgacaaagccattcaaaatctctgtaagggaaagactgtcattgtggtagcccatcgtttgagcgcgttgaagatgtgcgagcgtgtagcagtggttgaaaatcacacaattacctgtgtcggaacccatgaggaagtccgaaagaacaatgcttactatcggaaggcgtgggaggactacgaaacagcccggaatattacttatcagttggagggaggcgagcagcatgagtgagcatgatgtattgaaaaagaaccgtaatttttatattggcgttggtgggactgttctggaagggcttctctccggcagcctgtttatgctgctttactctgttatgcagtttttgtggtcgggtcaatttgacatgaaccgcgttctggctctgaccggtattattgcagtggtttttcttctccgtatcctgatttacagctacggttataccaaagcgcagattggcggtgcggaggtcagtaagaatattcggctttttatgggtgaccatttgaaacgcatcccactgtcccgctttacgcaggggcagaccggcgattatatcaacaccattacaagcgacgtaaacaactacgaaaaaatcctgacccataaagtcggagattttgcaaagaattttgccctgtcattgatgttgattgtctttgttatgacgctctatgttccgacaggaattatcctgctgatagccgatcttcttttaatccccggtctatggctttctttccgcatggtacggaaatatggaaaagaaaagaacgatatttgtgcggagaacgtcagcagcattgttgagtatgtttctggtattcagactttccgagcttatggtgtaggcggtatgaagaacaaaactgttatcaacgccatgcgggagttttcccggatcagctttgtgtacgaatcaaaagtgcttcctattggtgcggcctttggtattttgagttggctgtcctgcccgctggttatcttgctggcctatgcaccctgggtcgcagggacactgaacacggtggactaccttttgatttgtatgctgcccctgttctgtgcaaagctggctaactcgatttttgtagaccttaccagttataagaacctgatgatctcgaaaaacaaaatcttgagtgtaatgaatgagccggaggaaactggcagcatggagccgcttcacacagctacccatgaaatcacatttgacaatgtagattttgcatatgttcccggtgaaccggtactaaaacacgccacctttacggtgccagatcaaaagctcacggccattgtcggagactctggctccggaaaatctactattttgaacctgattgcaaaatattatgaagcaacgggcgggacgatttctattggcggtaaacccattaaccatgttgccgcagagcgtgtactggagcaagtttctatggtagaccaggacatatttctttttgacgataccatccgggataatatccgacacgctcgtcctaatgctacggacacggaaatcgaggctgcctgccgggaggctaactgtgacagcttcatccgtaagatggaaaagggatacgatacgccgactggcgagaatggaaatcttctctctggcggtgagcgtcagcgaatttcaatagcccgcgccatcctgaaaaatagccccatcctgcttttggatgaagcaacagcatctcttgacattgaaaatgagcttgccgtaaagcaggccatcgccaatctgctaaaagaaaaaaagacagtggtaatgattgctcataccctttccattgtcaaaaacgctgatcaaatccttgtaatgggtgatggcaggattgctgaatctggaacccatgaggaattgcttgcgaaaggcggaaaatatgctgctatgtggaacgcagagcaaaaaatatcggcttgatagaagctaaagaagaataattgcatagcgcatgaacctgccccgactacggggaaagaaaaaaaccgctggctgaggcaggtgattttgcgcgcctattttaagttattatcctaacggcggttttgagaaatcagagccgccgtttctttgcgcttgcagacctatgacgacttgcagggacacggtagccgattggaggttatttttccgtgtccttctttttatttcgcagtatccatgatctgcaccaattaaaaaaagcgtagcccctccgtcggagcagtccggttttgaacatgaaattaaacagtacataaccgataatactttttcgtgcgcttgtgcggccttgtgtcgcacaggcgcattttgctttccagacttcgagacaaagtgtcccgaggtgcggtgccgttctccgccgttgctccatttcgtttccgaccaaccccgaacaaactgaaatggaggattttacgatgactactatcaatttgaaagatttttattattggtacacgcaggatcagcttatcgaagtttctgacgaggtggccgaagtattcaaggccgatgcccgctatgagatggcctaccagcggcggctctcccggcacaaggcgcagtattctttggactgcgatgacgggattgagtattccgcttgcctgcatgagccgaccccgcaggagctccttgaacggatggaaacctttcttcgtctgtggaacgctctcaattctctgccggagatccagggccgcagaattgacgcacatattattcttggcaagtcgattaaagaaattgccaaggccgagggcgtacatgaggagtctattcgccagtcgatcaagcgtggccttgaacgcatgaaaaaaactttttgattttttcatcttaacccacttggaattgatgaaaaaatgtctcggtttatgagaggaggttttcttcctaacgcaagggaataacggcaaccctgagtaagtacggggagccagacggtgggtgcgcgttgacatcttcccaaagagattgagcgaacaacatcagcactgtaaatgggcccagccagcccaaggccatgatccggcgctgaacagactggctgcctgttcctccgggcttgtcgctttacttgcgttgagagcgccgcacagaaaataaagattgtctttggacaggtcaagtaaatatgtgcggcgctctctaatattcaaaaactataataaacctcgagacaaagtgtcccaaggtggagtaaggcaataggccagcatcccggtggtgctggcctgttgcgtttccccagcaaacagcgagaggcgttctatcaatctgcgaaggaggtttaccgtgaaattaactacacaggaacttgaacaaatgagaagcgttgacattggcgcggtggctgccgagtccctgcctgatgtgagcggtatgacctttgacaatgcgctttcccgaaaggagcgcatcactcgatttttgcagactgtcaaaaatccatactgcttttgcatcggtggtgttggcgtgaaaattgaatttgctgaaagcgggccatctctccaagataagctgacggatttcctgctgcggcaaagaagcgggctgtaacttcggttacagctcgttttgcttcttcgagacaaagtgtcccgaagcggaggcatccttgttgtcctcctcggacagagttataatataagtgtaatgtgatagggaaggaggaacaatggcacgagcaaaaaacagagggtatcagcagagtttctctccctcttacacaatcagccgctggcggctgggcatctatatccggctttcaaaggaagatttgaaaaaaggaaaagacgatagcaacagcgtaaagaaccagcgtgacctactgaacgatttttaccgacgcaacattgacgagtttgaaagcatcacggaatatgtggatgatggtcatactggaacggacgccaaccgtgaagattttcaacggctcttggcggatgtcatgagtggtaaaatcaactgcgttatagtaaaagacctgtcccgcttcgcacgaaattatagcgatgccggaagtttgatcgataacctgtttgttcaaatgggtgttcgctttatcagccttgctgagaatgtggacagctacaagaaccccgacagcgtttcaaatatcatcgttcccattacaaacgtgatgaacgataattactgctatcagacttccaaaaagatccggcaggtatttgattacaaacggcgcaacggccagtatatcggagcatttgctccttacggctatgtaaagcaccaaaaggacaagcacaggctgattgttgatcccgatgctgctgaaaatgtcaaactcattttcacaatgcttattcaagggtcatcaaaacgtgctatcgcattgtacctgaacgaacacggcgtaccgagcccctcggcttacaaggtacaaaagggcttgcctgtttcgacaagagggtatgacgatcctatgtggggagcccgcatgatccactccattcttaccaatccgacctacaccggggatttagcccaaggccggagccgggtgaaaagctacaaggtacaccagattgaagctgttccccgcgaggaatgggtggaagtggctggaacgcatgaggccattatcgactatgaaactttcgacaaggtacaggctctcttacagcgtgatacccgtacttccccgaaaggccgtgaggtacatttattcagcggctttctgaaatgtgccgattgcgggcgggccattacccgatgcgttggcaagaacaacaatgtatattattcttgctcaacctacaagaaccgttcccggacagcctgcaccatgcactcaatcaagcatgaacggctggaggctgctgttttgttcgctgtacagcatcaggtacatttggctgtttcctactcggaaatcgtcacgcagatcaattccgctccaatcaaaaaaagccagtcttaccgactggacgatctgatagctgcaaaagagcgggaactgacaaagataacacgctacaagcaatctctttatcaggactggaaagatggtgaaatcacccagcaggaataccgggatatgaaagccgactatgaacggcagacttctgatatttccgcagtgcttacccggctgaacgctgaacgcgcagaactggcaaacgatgtagacaacgagcatcccgcactggtagcctttatgaagtatcaaaacattgaggccctcaatcgggaaatcttggttgagcttgtggactatatcaaggtctatgaaaacggcaatatcagcgtgaaattcaaatttgctgacgagctccacaagattgcagagtacattgaaattaacactacggaagataccgcagtagcgggctaacccccgctacaaacccctttgacagtgtgttttcctaataggcgctaatcataagaacgcacgatgtcacgctggatacgcagcacttcgttcatctgcttgctgtccacaaaagtctgtaccgcatccggcattccaccgacgacggcatattgcagcaggagctgcttcatgcggctgtgtaatgcgtccggcaccggcgtttccgtatccaatgctttttgcaacatattaatgaccggctcggagatcccgtttgcccacaggaattcctcaaaatctagcggatacatatcaattacggtttccgaacctacgggaactgatttcggctccttaccatagccttttacgccgagcagagagccggtgccgatcacatcgtaccgactgtcgatccgaaagaatttcaatgcggttcgggcctcggggcaatcctgtatctcgtccaacaccagaacggtctctccggtctcaaaatctgcctctttcccaagcagcgcagaaagcagcatgacgatgttgtcaatgtccagagaccccgcaaaaacggaagcatagtccggattctcgaagaaattcagatagaccacatgcttataatttttcttagcaaactccagcacggaaaaggtttttccgcactgtctgcatcctttaatgatcaatggttagtgtctcggtgtgtttttccattcagtcaaacgcttttctatttttcgttttaacatcgcggctccctccgaatcgttttcctaactttgcgcatagcatatcacaaatcgtgaactttttcaatggactttgattatgaatcgcaaactttttcggacgactttttgcaacaaagtaaaactttttaaaacgactttttgcaaaaactacgaaatatataatataaacgagattatcataagggcatacgtagaatgttattttggtatattcaataaagatgtttttggagattgcaaaggaaagcatgggtattcctctggttaatgaagatcatctggtgtaattagcaccttattgcagatgcttcctcccttgtgatggtggtcaaacgataggaggcggagcaactatgatctattatactgccgatacgcacttcggccatgctaatgttgtagagatgtgcgagcggccatatcccgatgtagacgccatgaatgaagcgatgattgcggcatggaatgaacgcgtacacggcaatgataccgtatataaaaaattccgccgcagtgaaagctgtgacggaattttttagcatggatttatagatcgtaattctttttcaattttttgaggctgcggtggatgctgttgcaaacggcagaaatcgtgcatccttcggactgggagatttccacatagctcatacaaagaaagtaccttttatagatgcgccgctgctgggatggggtgagcgttcggaatgctttttgcagttttcgtcggcgctccttttgctcctgcaggtcttcgggtgcttcgtcgtcgagcaaatctctttcattttccgcggtcagggcgtaatctaaagagtagtaggcctgatatcgacataagcggcgctgatacgccttttcttctaatatggagcggcgcatcatctccgcgatttcatccaagaccgaaattacagagtcttcggtgtaaagctccgggtaatattcccgcagattgatctctttcatagaaaatcaggagcgcttggctttcaggcggataatgccgtacagaaacacggatattaagagaatgagcagagcaaaaagcaatccttccgtaagcccgtttcggtactcgttcgtccatgtggatcggtgaacagccgtgtcggggtgctcgggctttgcttctgacggtttagaagtggagagcgtttcgtcggggaaaattcgatgcccgcgcacaagcaggcggtgcgtattcgtgccgtatggcgtgcaggtcagcagcgtcagaaggtcttcgccgtcgatgatctgaatggcgtcggtgtcatcgggtgttgtgaccgtgattttgtctacctcatacgtcaaagttttattcagcacgtaaagatagaccagatcaccttctttgacctgatccaaatcggtgaacattttagaatctgctctgccggagtgtgcagctaaaacggcgtgcgtgctttttccgccgacgggcagagacgaactcggcaggtgccctgcacctttgctgagttcgttttccgtgcagccgtggtagatcggcaggcgaatttgaatggctgggatctccacatagcccatgatgccgtcttcggtcgtgcagagaagttcgccgtagtccgggcgttctttctcatcaatctcgccggtaaaaagggcatcgttatagatttcggcttgcttgaatgcgtcggtcagatcggcatcctctatttttgcaagtgccttttcgtactcggtcaggacaacggatcgtttttgctcggtataccagttcccgaacgccgggtatgcggctgccccgatgccgatgaggaaaagaacaagaaaaagaacgtgcagcaaaattcgctttttgtgcataaaagtctccttaataaaacggagcccgcctgtaagcttcaacacaggcgggctcgcttgttatgcttttttaatcgtcaaacttatcttttttttgaaaaccagaagcaaaataaccgctgcggcactgagcacggcgagggttatgccgccagctgcaagaagtgttgtgccggcatcgccggttttcggcaggcgatacccgcgcgtgttcatcacatgaatcggcacaatggcggaagcagaaccgttatcgtcgttcatgtctttggcattgtcgttttcaaacgcttcggcagtcagctcgctctttccgcaggtgccgcagatcttgccagactcttttgcgcggatttccatggtgatgaaatttccgagcagcgtgtaatttgcatccgtgttgatctccgtcacgcggtagatgtcgtcttcaagaccttttaagaaaagatgcccggaactgccgggggtcaaaacggaagcgtcgtcttccctttcggcatgtccgctgacgaggtaattaccgttatcatcggaatttgcggttacccaataaccgtcggtcgtgttgtagagcttgaactgtaccttggaataatcgccgaggttatccgagaacagctttaagaggtttaatccgtacacgtagaaatggcagtcgtccgttaaagtgtccgaatacgccgtgttggtgcgcgaccacgttaaggtgacttcgttcgggttgccgatgtcgccgtataccggcgtataatccctgctcgagttccgcggctgaggtgtgccctgtgctgtccgtttccggcatagaagtgccgttttggcggataaaagcttccagtgcgtttttcgtccggctttctgctgtgttcagatgattggaaagcgcatcaatcaaggtatccgaagtgaaatacaagtcgccgcggtcggttttgtaggcgttttcggaagtgagatcaaggcaattcataagcgcggtggttttgtcgccgcccggcaatttatacagcagcatattttgatgttcgccgtcttttgtttcggcatgtaccgcaagatcggcgattttggcatagctgaatacaacgccttcgatggcatacggcatcaaagtgttttccacgttctcatcggcatagccggttgaaatgtacgtgttgtctcccagaacaccgtctgcgtgcgcggaggtgaaatcgtatttataaagcgatacggatgcttttctgccggtgtcaatcacggcctgcggaacagaagccgccgaaaccgataggatgccggagagtaaaaccagtgcggcggagagcaccgcgccgagttttatgagtcgttttgttttcatagcgttgtcctttcaaaacttttctttttgaacatacagaagaccgaataaaccgatcacggcgaaaaccataccggttgcggcagattgcatcccgtttctgcccgcggcgggaagctcaaattgctgcccgttgacggcggtgatcgtaatatcctgctgcggggtgccgtttacgtcctgcggcaaactgccttcaaacagcggctcgcccaaaagctgaaagccgtttttggtgcgcacttccgtgatgcggtataggacggtgacattttggtttttaacttgcaaaccgttaaacgtaaccttgccgtcctcacctgttgtgagcacaccgtcggaaatcccctcggacgtgcagctgccgacggagatcggatctgcttcttttcttgcgcagatcggagaccatgccgtgccaccgtctatcgagtattgcagcagaaaagaaacgtcgtttagtgttttgccgtccggtgtgatttttcggattgaaacagaaccggcgctcggggtatttttgcggacgatttgaatgatctgccggtctttttcaacggtaaacgggtacacggtggaatccaattcatacccctgcggcgcggagatttcgcggtagtacccggagcgcaggtcggatacggtaattttgccgtctttgccggtggtttcggtcgcgatgacgtttttgtcgctgtccatgatctcgaacacggcgcctgcaagcggtgttttgccgtctgcatcgactttgcagatttcgagagtgccgcgaatcagcgtgttttcaaactggacggtcacactgcttttggcggtcaatgtgatcgtctgcggtttcggttggcggtaagaagacggcgtgttgatctcggtcacggtgtactgaatgagcgtgctcgtgcctccgcgaaagaccggcagctcgctgattttggctgtaccgttgtcgtccgttttgaccgttacactccagttatcggtatctctcgtgactttgaaagtgagccgcttttctttccgtcttcggaggtcttttgaatgatcagctcaccgtaattgatgcgttctgtttgaaggcgcagataggcagaaacggtggtttgcccgcccgtaaaagtcgccatgcgctgaatggcgctgtctacgcatttccaaacggcaacggcattcggcatcgtccgggtcgagtaaatgaaggcaggagtacatcttttcaatcatgagccggtcttcggtttgctgttcgatgtccgtgttttcatcgcgcagcgggatttcctcggatttaaggtctaaattgcataaaaaaagagcgctatctaattttcttagatagcgctcacgttccttctctcggtagaaggctttgtaggcgtcttttggaacttccagcagaacgccttgtaccggtatgaaccagtgcgaagctttgtaattttcagttgtgtttcgtatgcggcaaaattccgcatatgtgatttgtacatatccaacgtctgttttgatatagacgcatttaggctcgtttgacaatagaataacctccgatcaatttgaattcgatttcaaattgatcggaggcggggcgcggggagcaggaaagtggtgaaatgctccgaagatcgtaaccccggtaaaaatacaagaactataaatgatgcagaacactaaacagttaaatattctgttttattatattgaatttttaaattgctttgaattagctttaagttttgttttgaatctttaagaaaggtgttttcttcgtaaaaaatgaaaattcgcaagtttgatttaaagaaatccggcaccaaataaaaaagacgatttatgactttagatgaactctcgaaaatattttgatcgattgtataagcggagaaaagttcttcaacggatagagtgcggctgccttttcgccaatgtaaataatattcatatacttcatcctttgtcatattaggtcaccactttcaattttttctaatcaaaaacctgttcttcatgtgacataaagaacaggtttttgaggtttgtgttgggcttcgattacttctgaagcatgctcggaacttcgggctcatagctgcagccattggaagctgcgccggcaccgagcgatgcaaacagttcaacaatctttgccaaaactgtccatgcgttcatacactttccctccttgtgctattctttttaaataaggtgattaccatcataatggcaactgccgataatgacagtgcccaggtagctaagtaacgagtgggcataccggtgatgtacaaaattaaaaacagcaaaaaatcaatcgaaacgataattcgagctgtttttttattttgcgcatagagccgctccgataatggatgtttagtgcttcgaataggagagagaaggaaaatggagatacaagataaaatagcaaaaggaataagcagaggcttgtaccaccgaataacttcgctcagaaggtatacaaatacgaaaatagcatttgttagtatgaagcatcttgaataggtgggagcgtggtatccaccggaaaaaaggcgcaggaagaaaaagatatataaaaacagcaaagaaaaatatacattcttaaatataatagaaagtaaaataatggaaagtatagacgatagagttgataagcttagttcgaaaccgtatacaaaaaccggacgcttttcttcagaaagcgggcaatgacggtataaagtgtgggttaagtattcagcgcagctatgtaacatttattcaccttcttacaaggtgtagtatactattttatatagatataagtcataggttttgcgcgaattgtaagattttatgtcttaaactgttgaaacgcacaaaagaacttctgaaatgaaggtgtgatcatcataagagttttttagccagccgttatatttatttacagtgtcctgaatatttttgattccgagaccatgaagatttccgtcttctttccttgtttttagcgctccgctttctgaaaagggattttcggcagaggcgttctccacacggaaaatgagaaatcctttcttttgtgtaagcatgatttttacatagcgtgcagaaatatcagtaatttgacggttggcctccagtgcattttcaatttgatttccgagtatggcgcacaaatctacgggagcaacgggaatatgtgcagtgaagttaacttcgtattgaaaatagatttgctgttttttagcttctgcggcagagcaattcaaaatggcatcaattacatcgtttccacagcggcacaaatgaacttctttgtacgaaatcgataacaaatctccgacatatttctgtatttcaccgttctgagcagcttcagccaatccgagaattgctttgagatgatgatgaaaatcgtgcaatcttttagcgttttctttcatatcctcatgcagcatttgatagttctgctccattaactgatttgtgcgtagtaaaagctgtttttgcacattttcgtgctctcttgcggaggtgttcagcagtaataggaaaagcgtggcaaagaataatattaaaattaaaaaggataagatagacgctcggtaaagctggatatagtcttctgataaaattgccctaaaaagaatttgagttataagatatacgagagaaccagagaaaagtaaagtgataagccagcgagattttagctctgataatttagaaaggtatttccgcgcagccatgtataaagcaatgtcggttattttatccagaataagatataaacagcgtagaggtcctggcgtcataaatacgttaaacgctatggagaattggtctcctccataaatccagcagaatacaaccataagaatatagtcaatagagagtataacaaacatggtcgtaatgcttatggagatacgcagcagaaaatttccgcgtgaaaggatgcgtgaaattactgttaaatataaaatagacaacacaggcgtaataaaagaaaaagcagaaatctgattgcatacagccacaagaattgcgttgagcagggagaaagataaaagcagataagcctgttttttctcttcaaatttccgaccgccggattcggtgacaacaactaacattacaaaacattctatatacgaaataagccaatctacaatttgatatgtcattttactagtccatctccccacaaagacaaaatagcttcttttactttcggcatcatgggccggctgaccggcagcgcctctccgtttaacatgataatagagttaccgcacaattctttagcataatccaaatttacaaaataacttcgatctacgaaaatgaatcgcgggtcattgaggatgtcaaatagttcttttatacctcgattatctttgatcacaccttgatttgacgtaatgatttgcacactgcgggcagtttttcgaacatagataatattctggtaaagtactctgctgaaatttttatagtgctgaacaagtagcgaatgctgatcttgttgctctaatgtgtgaagagctttctgtaaagcctcaggcagagtttcgtctacatttaattttgaaataaatcgaagtgcgtctaccttatagccttccggcgcatattgtaaatgagaggttaaaaagattaatgcgacattgggctgatactttcgaagatcagccgcaactttgaatccatctatctgaggcatttcaacatctaaaatgaaaatatcaaagcgatctccgctggcaacggaagcggtgagtgctgttggatttacgaaagatgcaatggctgcatttttctcttcaaaacgtaacaactcttgtatttttcctgtgagttctttgagaaacacagcgtcgtcgtcacataaagctattttcaacatgggtataaacctcctctgttattgtgggctttgaaaatgagtaattacatcgtctgtttatatcataccatctgattgagttttccacaattaccaatacatacagatcatttaagctgcgtgcatttttagggtttaaattactattataaatgtaaataccgggaagagcacgatctattttttcgtaaacatctgtaacaatatctgcaatgcggccagaatgatactttgaaggcgtccaacgaggaatagtaatacgaatattctgcggtgtcggttgaagaatttgatctggcgagggagaggcttgcaaaattattttaagttcagatgtactgaactcgtttagattacagagaatagataatataagataaaaatcaaatttcatactgcataacagctggaataatcggaacatttgagctcggctttctggggccttctgtgttttacaaagagcaaccaatttccgggttacagattcaacagattcgttcatagagaattgatattgcatagaataacctccaattatctttttctcattatatcggaacctgtcaaataagtaaacctcttttgcgttttacgcaatggtgcaaaataaggtttcttgctaaaattttgtagaggtggttctatgggcaattctattggtggtagaatcaaagaattaagacttttacaaggcatgacgcaagagaagcttgccgaactttgtgatacttccgtttcatcgattgccagatgggaatccgggtctctgcatccgaatatgaaacatcaggaaaggcttgcagaaattttcggtatgagaatcgatgacttctatattaatttagatacgcctgtgacgcaagactatattttgtcgcaggtattaaaggaaactcaaaaactggatttagaggaacagaagtacgtgctgcaggttattcggggcttaaacaaattaaaacaccccaaatcagtatagaataacataatttaaaactctgcatttttgcttgaatcgcagaattttatgtactgttttgagaaatgtgctaattaaaggtgttataaagtttaattttaataagagtaaaacaacgctatggcgatttttatgaatcatcatagcgttgtttttttgtttttatttttctctaaaagtattaaaaacgcctgtcatacaaaaaacttgatttggacttactaattatggattaaatcaacaaaataatcaattcatgcaaaaatacgtacaaaattaaagaagaatgataatatgaagctactttaagattcttattcagtaattttctaaagataagcgaacctttagtatcttaagaaattctactgaaattagaacatactaaattgcggacgggaggtataatcatgtttcgtttagcactttgcggaaaaaactacgaactattggaaaaaatagaatctcatattcaaagctttgtagaaacatataaaaatgaaactaagtgtatttcgattgaacagtataagcaattagcatcgcttcgtgatgatatggtagatggaattcacttcgatattcttatggtcgaaattgatgctcatccacatgaagattttcgtttactttcggaaatacgaaaaaccgctacggacactatcgtcattctcttttcaaagtttctcgactacgattttactcggctggggtatcaggtaggcgcatttcggtatctatccacacacaatttgttttcggatctgtcggaagcaatttgcactgcactggaaatttccgctaaaaagcaaaaaagatactacacgttttctcattattcggaaattatccgaattccattagatgatgtcttatacgtaaagcgagttaatcgtataaccatgatcaaagcaaagaacggcaattttcatcttcaattaccgttaaaagagatttataaagaaataaatgacagtagatttttatttatagacagaagctgctttgtaaatatagatcatgtgacttgctttgctgatgcagaagttaagttggataatcaagagagcctaccgatcagtcactcaaactttactgccattagaagcgtattactatataaaacacctaatgaaatacaacaacccgtaagataacttcttatttcatattccatataaaaccgcccgctatgtatctaattttgatacatgagcaggcggttttaatttttacggcatcggaagaaccatacgcacgcattttttcactgggtacaagctgacatttaggtacataacgatttgttcttttccggcttgttcctcaaggtaagtcacgccatctgcacggctggatgttgggtagaccatataaagagaagcttccgttccgggcatcacagagatgccatctgcttttgagttaagatccgggtttgcgattttcatatagatttcactcttattgaagtaagcggactgcgcttcattcaaaaggttaaaatcgcggataaaaacgccgccgtccgtattgttttcatttttgaaatcaacggtcagcagaaccacgtcatgctgcgtgttttctgcaagataatcgacaggcttgccgaatcgctgcataaaatcttcataacgcactacttccgcttcacgaacacgaacagaatatccattggtattttcttcttttgagtagaaaaaatcaccgtttaggggaatccattcgccgatgccgtattcctgcgtttcaaatgaataggcagttgcattaacgtaccagatgcgccatgcacaaagcaccagtgcaacggacaaaagaatgaccgaaagcgttttactcactcttatcttgcgtttcatacggcgttacacgtccttcccgtacaaggtagatttcatcggacagctcgcgcaaaacagaaaaatcatggcatgccagaataatcagtgcgccgcgctgcttttgctcaagaagcagatctctcaccatttctatgccgtctgtatccagtgcgtttgtcggctcatcaatcagaagcagcgcaggatattccaaaattgctccggcaatgcctaatctctgcttcataccgagtgaaaactgcttgtattttcgcggatcatccgcgccgagtccgacctgctccaacacttcgcggatacgttcctccccgacttttcggtgaatatttgcaatcagctttaagttctgtgccgccgtataatgatcgataaatgccgggttttcaatcagcataccaatgtccggcggaaaagaaatatcctttccaagtaccttaccatcaatcgtgatcgtgccttccgtcgggcggatcagcccggcgattaaccgcataagcatagttttaccggagccgttcacaccgcgcagaccgtagatcgtaccgcttgtaagggtgagcgagacgtcttcaatgacggtaatattcttgatcgtttttgtaacatgatttactacgatttccatataggcttactccttttcatgactacgataggtctgagccgagaatgtctcgatattggaacacaaaataccctataccgatactaagcacagcgagccatattcccaataatataccgaacggcatggtcagaccggttgacacaagcagtgcatttcttgcgcccatggcatagttaccaaaaaacaccgggttttgaatataggcgcctgcgaataaatagccggcaagtacgaagtagctttgcaccggtttcaaaataagagataagatcaactgcaccaatgcgagtacgatcatggtgaagccggtcattaaaaataccgaccaaatattccaagtggtgctgctcgttaggtcgtctactttcatgtagagctctctcgaaacataccaatttgcctgcatactcggctttgcaccaaagcataatccggcaatcgtgctggctgcaaaaacgatcaaatagtttgtaatggtattgatgattgtccaaacacattttgaaagccaccagtttcctctgctgccggagagcaccattagctgtttgcctatgccgtttaattctgcaaacggataatacagagaagtaaactgcatccacaaaacgaatacgaaccacatcgtcggcattacgaaatcgttttctgcgccggagatcaaatttactttaccgcagccgccaatcaatgccaagaaatagtctgccgttgtaacaggagattccagatattgcggatctgtgagctcgaaaatgcgcagcgtccagaaatgatagatcgaaaggaagaaaaacataataaatgtaacgattaagcgctttttagcacgccctatgccgtagcgcaaatcgtgatccaaaaatttaataaacatctgcgtttttccccctttccaaaacaatagcgagcggcagaagaatgagtgaaaccgtcataatcgtatagaccacgatagattgattggacgatgaactggtcatccaaatgtagtttagaacagaggtttcggtaaatgagcggtatacggatgctttttgcaaagatgcgatgatatacagcagtacaaggtatggtgcaaaaagaaccacaaatttatttttttcaaagaatgaaagtgcaagcggaatcgttgcccatgcaccggcaaatataccgatcatcagcatattcaggaaagctgtgcataacgggtgagcgtagtagaggtttccgagcagcttagttgcgcttacttgataatataaggcaaagtttatatccgggcgataagccggcacaaggcatgacgcaagcaaaaagctaaaaagcatcggcagcaaaaccgttaaagcccctgaaaggaacgtggagacatattttcctaaaaagtaagaagcttttccaagctgcgatgccataatgcggtcgtatccgttcttttcttccgcaagataagaccagctgtacgggataacgacaaaaaccggcatcgtataaaagaaaaccatcggcagcgtttcattggctcgaccgccgatccacgaattataaagagtgtagatttgcaggaaagggtattcggcaaaagtgccgtctgcctgcaagtctacagttgtaagagtaagctgtaaattatctttatatgatttataagccaaaatatcatctgctgttacgattaaaagtaaaatcagcagcacaaatagaaatgatttgctgtgaaataaattgtagagctcattttgcagaaagtgcctaagacttttcatgtgggctatcctttcattttgctaaatcacgcagcataacgccgtaaaagatttctctgccgggggtgatggctaagaacggatctttttgcgataaatatacgcggtcgatcaaaaactctattgtgaaattttgtgtttcgcccggctgtaattcaaagctccagtaatcgtctccgggaccgtgtggatcaaaataggtctcgtatgcagaataataatttccgacggttgtatacccctccgggttgttctgattctcgggaaggagatcttcatacgcgctaagtacaaacatattggcgttgaatttatattttacgccgtttttgttttctgcatcaacattcttaagggataattctacatgcagtatgcacgggtcttcaaagtcggatgcgtatcttgcccagatagaactatccgagttatatttaatatcactttcctcatattctttaacgatagcatcagttatacaaagctctaagtcgccatcccagccgagccacggtgcatcttctgtttttgcttcgccttgattatagtaccgactgtgcagcgtatagggttcacctatttccgcaaaagtccgtataagggcatcggcttccggtgaattcacttccgacgaagttgtttcagaagcactttcttttggttcactttctgtcggtgcttcgcttgacgtttctaatggagaattcgagctttcgggttcagcagctgacatagacgatgaattttccgtttccgcttcacttgatcgatccatggtaaaataaataaccgatgcaccgaccagcagaataagaattgcaacagtgaaaattatagcttttttgttcatgatattaactcctaaattgagttgatttacaagattatataaaaatctacattcaaatagattcagaattctaagtttatgtaacgtataaatagcatgttgctgtgtgcttttcagcacacagcaacatctgactatttagttgagataggtgtaattggaagcattggttgtatctggactccaagcaatcttgcagtcaccccacgaataggttgtgtcagaataatgaccccggatacgtacgtattttcctatttgagaaaccgaagtaccgtttgctcgaattacataagcggtatagttgttaatccaatactccgaagccgaagcggagagattcgcgctctgtgagcttgtgccatataatgttttggcataatatccgttataaggcagtgtgtactcctgagttttgagataaaccggagtcgcgttcatcttttttcgggtgggcgtgtagtcataccgggaattgcttttccaagaatatgtgtaataagtatcctcggtattagccgcactggcggaaatcgtaaatacggataccaccgttacaacagccatcaacaacgctaacagtctttttggtttcattgagtttgtcaccccttcgctaaaaaatatttttgtctgtggtggccaccactgcttgcaaaatcaagtttcaagctatatatagctgaagcctgaattttctgtctatacaataacatatagttgatgtttatgccaaaatattgtctgaattgagcaaaaattatgtctgaatatttcgttgcactgtatacttacttatattgcaaaggatcactgctaaattatgtaccagccgctcaaatcaggcggctggtttcctatgggttcaagatcccgtagccgagaatttcataataccccacgggatattggttctggcggcagctatcgccggagttgccctcgatggtgtagacgatgccgttttcgcatttttccacaatgccgacgtgatcggcttcgccgtcctgcgggccggatgcgccgtttgggtcattccagtcaaagaaaacgatcatgccgggagcgggctcaatcgtattatccgcccattgctcgcggctgcggaaccattcaacgccgccgacgcacccggcaaatttcggggcggttcccgtatcaagataaccgcactcgttaaagcaccacgaaacaaagcaggcgcaccattccacacgggagttaaatccgtaccacgaccaatagggctcaccgcccgcattgccgacctgcgacagcgccgccttgacgatggcatcatccccggaataaataccatagagaacagcagaccacaacctgcggttttcctcgtcaagcagttccgagagttgcttccgctggtcggcggtgaagttgaaattgtctgccatttcctcggctgttttgtggctgaccgtgatataaaggtaggtgcgcgtgaccgtcgtggcagtttccacgatgttcccgtggccatcgtcagtttcggtgatgacttcttcagtcttgctttcggtgcgggaggatatttcgttcatccgccagaaaatatctttgaggatggctttcttgctgtcgtccaccgtagcgacctcctgcggatcatcggggtcggtggtggcttttaccgcatataccgccagcacctccggccacaccgcacgggagccggacatttccagctcgtcataggtgagatttgcccttgtggtgtcgatctgcgattgataatcggcgttgatctcctgcaccgcctgccgcatggtctgtcccgtgccgctgtcctcgccggagaaaaagatgccgaagcaagaaccgacgatcagcccaatcacgcaaatcacaaggatgataactaccgcaacccacccgcctgcagcaatagcggcgatcagcgcctttgttccggcaatgatggctttgacggcggcagtggtagccttgaccgccgccttaatgcctgccgcagttgcttttgcggtcgcacaggcagtctgcgccgcagttttggcggcttttgccgtagcctgtgcggttttctgtgctgttttagccgcagcctgcgtcgtttttatggtcgtccgggcagtctgctcggcggtcttgatggttttctgcgtggtcttgacggccgccttgcccgtggattttgccgtctgcttgatggtcttgccgctgcgatccaccgttttgatcgtcttttgcgtggcatcggcagagcggcgtactcgccgcatggcgtcttgcgcctgctttttcggcaagtcggttcttcttcgctgaaaatagtcctttgccttggagatattctccttggcgttttttacacccttgcggccaaccttatccagcccgtgaacagcttcgtgcgccgccgtttccgtcccggtcaaagtgcggtcagcggcgtattcttcgggagaggattccgccgcaaaaatgccgtgctccgctttgtctttggtgcggatataggcattcttcatccgctcggcggctaccaccgatttgtcaatcacctttaccgttttcttgaccgcatctctcgttttgatgtcgggcatggctttacctctgcgcattgccgaacacaccctcgccggggcgcgtcgtcatcaagcggtaaagctcgttatctttcggaaagcggttgataaacggcaccagcgccgagccgtacttgatcagcccgcagcctgcgtcggcattggtgacatagctcatctgctcgtcggaaatgttcaggagcttcgagagcttggcacggtcggaaaacgcctgattgagcatgataatgaactccgaattggagagcatcgtgctcgcctgcacggaatccagcaggtattccacattctgcgtgatggcggtgggatatgatagccgatttcggccagcgaatggagaacggtcgcaaagtcccatcctcgattaacggagagcagatttttaacattttcaaggacaagccattcgggtcgatcctcggcaggcgtgcctttgagcagtctaatgatttcaaaaaagagagagcttcgttttccggcaagccctctttgccggccagatacagaaatatcctgacacgggaatccgcctgcccataggttgaccctcggcaggtggttgggttcggttttggtaatatcttctccataccattcgtcctcctgtatatcgtgtatggcgcggtaactgcggtctgcgaatttgtcaatctcgcaatggcctttacagaccatgccgcaaagttcaaagcccttacggaaaccgccgacaccgctgaaaaagtccaaaaaggtcatgggttcgttcaccggctttcctccttccgggtataaaaatatcgccctccgcatgggcggggacgaaaagggtttcagggatttccctggcaagtgccgttgtggtatcacaacggcgatgcttgctggtacagtgcatagcgttcgtcccataggccgaacattttgccaccgatcgaaataacatcaccgctcctgctccggctgcggacggtacgggataccgaacagcgtaccgttcaccctcgcaaggtgttcgggatagcggaacatcttgccatagcggtcgatctgctcgtcggaaagactggccagattttcaccccggcagtcgcagataaaggcggggccgaagatgaaatccaccatcacgccgtcgtcgttcttcacgctgcggttcgggcgcattccgttgatcttgctttcctcattgcagacgatgcagacctgctcctcaaaggggtagaacggctcgatcagaccgcccactactttctgcatcccggcaagggatgcgtcgatctcggcagtgcgggcgagcttgcccggttccagcagtaccaccttgattttctcgctcataattgaaaactcctttcatcgttgaaaaattaaatcgtttatcgttctttgctcctttctccgcgcttagtgatgggcaatccaagccgcatacaaaggcagtcattataatccttaccctgcgggggcggctggatgtccaccgtgaccgcatattttctcggcagcagcgccttgatggtttctgcggcgatccgccccgtggcgtcgttatcaaggcgcaacaccacatgacggatatggggatgctcggcaagataccgcaccaatgcggcgggcaggctgctttcctcgatttttgcccttggcttgtagaccccggcgagggagagcaggttttcactgcgccagtccttgccgtccagcttttgcagcgtcccgtaggacagcagatccaccgccgactcaaacaggtggagcgtatcgcttgcggccgtcgcaggaattccaaaggaatagtgcttgtcgctgccgttggcatccccgatgaagtccgagccgattcctcgctggtttgcatagcggggttttccgtctgcatccatgccgacgaacaccacattgtgatagggatagctttcataaaggcgaccggtttggatgcagaagtcgatcaactcgtagtcgatccctctgtggtgcagatattcgacggcgtgggtggcgctgcggttggcctgcggcaaaagaagcaccttttctttcggcattttcggagccgggacaaaggcgggcggcgccgctgacagatttcccatgatggtttcgaccgcctgcgtaaagggcatctctttgaccttgatgagatagtccagcgcagaatagccgccgattccacgggaaaaccagcaccatttgccgttggagatttttaagctgtcgtgctcacgggtgcagtaggtgctgcccccgaaatgcaccagctcttgcggttcataagtccgaagataggtcagcaagtccatctcacgggctcgcgctaccacctccggcgggatatatggcatatgtttcacctccgttctgacatgaaaatagccgaggggttttcaaaatgaaaacctctcggctatgtatgtgctattcaatttatcgaagtgaatctgcccgtccctgcgtttttattatgcctgttccataattgcctggtatccatttactttatcgccagtgattctaatcgaataggcatcaccgaattttgctgtaaaagtaattggcttcatcggcatcgtatattcttcaggataaatgttctcatagtttgggtcgcagtattctgtgataaccgtgaaattcaataaaagctcaaccatatcagaaacggtttcgtagtgttgcttatcaatcgaccaatatatcaaatcgtcttttttaagcatggttttatccgcgttggagatgcctccactctctttctgcccgtcgatgtcgctatcaataataagaagtcccacatcttccttcaaatcaagttgtatctgaagggcgatttcgttctcgttgatttctgacggttggtctgtcctgtgaaacgcaaagatcacggcaatggccagcacagcgacaacggcaaggactgtgattacgatttttttcattaccgcttcctccatgtcaacatgactccaaccacgcaaacaagcagcacaatgggggcaagccttgcaaagataaactcgaaaccatgtagaatcgttcccgcaaccgccagttcaggattactgtaatcccagcccaaataagaactcttcattgctgcaagaacgacatatacgataacgatcagcgcgcacagagaaaggagtccccaccgaatgacctttgtccgtgccatggttcttttggcaagctggaggttgattatctcaagcttttcggaaatagtcttgagatcgtcaggctcctgctcctgtatggtttcaccaagcaacgcacttacggatgtgtctaattcctctgccagaaaaatcagtaaatcagaatccggaaccgacaaacccgtttcccttaattaaagatattgttagatgaaaaagaaaggtcagtcgattttgccgatgaagcggtagtagatttctacttcctgttcacggcttccgtcctcgcccttgacagcttcgtggacggttattttttcaattagagtgttcagaagttcggcggtcagctccacagggttgacatactgtttcattagggcaatccacttttcagcatccgctgcggtctgtacggcggcttccatcatttcgtgaagctgtcttatttttgtttcaagctccttttgctcgttctggtacttctcggacagcatattgaagttatactcggttatgcgtccggcagaccagtcctcatacattttagcaaacagcccgtcaacctcggctttacgcttctctgcctttttcagctccgcagcctgctttttcttcgcagagttcctttccctgtcgctgacattgagcagccgtttcagcagcttgtcctcatctttctgtgccagcatagaccagtattgcagtcttgcaagcacataggcatacagtacatcatagcggatatagtgcatggaacactggcgtaatccctgtccgttcttgctgcaatggtagtacccgtatgggtttttgttctgcttgttttccccataggctaaagaccatccgcagtctgcacattttatcaatcctgcgaaaatctgtgtcgtaccgtttctgcgtttcctgcgtctgcttgcaatcagctcttgaactttttggaacacttcttcggaaatgatggcttcgtgggtattttccacacgataccattcttcctgcggcttccgcacctttttcttgttcttgaatgaaatgttgctctgcttgttgtgaacgctgtgaccgatgtaggtttcctctttcaaaatgctcttgacctgtgcaatcgtccacgcataggctttttctgcgggcgcaccggcgtagatattggcgaaagtcccgtatctttcatagttcagccagccgggggtaggtactttttcctccaccagaatccgtgtaatgctggcggctccacgcccgtgtacagcaaggtcaaaaatcttctctacaatccagcgtgtttccgggtcgatcagaagatgaccttttttgtccgggtcttttacatagcccagcggtgcataggctccatagtgtgcgccattggcaaatcttgtgtgcatggcagccttgacctttttgctggtctgtcgggcgtgcatttcattcaggatgtttaagaacggtgcaagctcgctttctccgttgatggtgtccacattgtcattgatggcaatgtagcgtactcccttgctggggaaatagatttccgtgtactgaccggtcaggatatagtttcttcccagacgggataagtcctttgtgacaacgcagttgattttcccgtcctcgatgtcatcaatcatcctttggaaactcggacgctcgaaatttgtcccgctccatccgtcgtcaatgtactcgtctacaatggtcagcccatgctcagcggcatactgtctaagcatcatgcgctgggtctggatactgccgctttccccctgtaattcatcgtcacggctcaatctcaaatatagtgcagtgttataaatcgttgtattgtatggttgtttcacggttaaaaatcctccttctaaaagaaacaacccacgcttatacaatactcgctggtacaagtatatcataagcgtgggctgattgacagtcgttattccgtattttttcaggaagcggcggcagcgtgctggatcacatcttccagtaggctgtcaagcggctttccatcctgtgcgaaatgctccgataccttgatacggaccttccccatgacaaaatactgggtgccgtctttttcggtaagcagggtgccgctgtttttgttattgctctcgtttttgctttttgccataggcagttacctccataaatgaaatatgcccgacaagggaatgtcaggcaggtgtacagccgcagactgtctccgtgtcaaccaaaccgtgtcaaccggcagaaaagactttgaaaacaatccataggcgctctattattactttttactttttctttgatttcttggttgacatggttgacaaaggagagaaatgccccaaatatcaggcttttccccgtcaaccggctgtcaaccaaagcgtcaaccaaactgtcaaccggtggcttttcagaatggcagttccatttgccgggcttcttcttccgtgatttcctgaaaaccgtccccctccggcggagcttggttgacacgctcccagcctttttgagaaccgtatttcttataccgcttcgggcttttgtaggctacccagccctgtatgatgccgcccgcaatgccggtattcataatctcgcagattgcccgtgtctcccagtctgccggggaatttaagttccccaatgcttcctcataaagctgcttggagcataccctgtcgccggtgtagtcctccaaataggcgtagatcatgccggcctgtgtgtcttcctgcatgaagtcctgctggtgggcgttcagatatcggttcatttccatactgaatgatagcttatacttcccgctgcggtaaaccgtcatggcttccgcccacatctgttcgatatacgccctcgccgccgcttcatcatccagtatgtgaacctccgcccgttccgggtacaccgtcacggggagaaagcgccggttgccggtgcggtcacgaggtaaaaagtcctgccggttggtcgtccctccaaatacacattgccgcagccggtctgccgggtgtgtctcatacggcactttgtaggtttctttctggcggcttaagaatgacttgatttcctcaatactcttggcattggctgtggcaatcatctccgacatctcgataatccaatgcccttgcagcttgcggtacacattttcatcgtccagctttttcaaatcgtctgaaaaccattcgtccctgcctgccagcagccggaaaaaggtagatttcccggctccctgaccaccaaccagacagagcatgacctcaaacttgctccccggtctgaatacccgccggatggctcccatcaggaacagtttcaaggcttcataggtgtattcgtccgtatcggctcccagaaagtgatgcagggcgtaacggatgcgctctgtgccgtcccattgcaggctgttcaggtaatccctgactggatggtagcggttttcattggcaacaatcttgatggcgctctgcacctttttctcgctggtaagcccgtaattttcttccagatacaaaagcaggtagttcatgtccatgtcggtcagcgtggtactggtgcgctcccagcccagcggcttcacaatgtcaatctgctccgtcaaaaggttcaggcgcagcgccccgcgaaacagagggtcacgctggaacaccgtcaggcagtttcggatgctgttcttcacgccgcctttctgcgtcccctctaatgtttcccggatttctgccggtgtctgcgccggttccattgtgtccatcgtccttttgaccgcttcctgcgtttccggcggcaagctctgaaattcgctgttcaagccgcaacacctcctttccctgtgcggcgatcaatgccgctttttcttctatttctccgtataacaaaatatccaaaaggtattctgtgtagcttatcctctgcaacgcttccacaaaaagaggatgccagatggcatcctgcggctgtggggcgtgtgctgttttccaatgctccagcaggcgcagataatcgcatagcacccggaaacaataccgttccgtttcctgaaatctctgctccgctgatttttgtcggggctgtgacctgttgtgacgcttcctatctggcggcgcattgccggatttctcataggaaacgccgaagtcctccgcaagcctgaccgcagcttcccgtttccccaatccatgcagcaaagcggcaaagtcgatcacatccccggaagccccgcagccgaagcagtaaaagcggctgtccactttcatgctgggcgtgcggtcattgtggaatggacagcagaccatgccgtttctccccacccggattccatagaatgaagcagcctgccgagtggtaacagactgtttcaccgcttcaaatacattcaaatgctccctccataaaaatactggtagcggtaaagctgccgattatatcatagctccatctcatgtttctttctctgtactgcctgtggctgctccctccggcgcagtgcggtatctacggcgttctgcacctgccgtagccgtatgacttcctcccggagtggcttgtgctgcggagacagttcggcatactctgtttttaactgtgcgtattcctgtttccatgctttcagggcaatgggttttccgtccagtttttctttcaaaatacggcgggcggcataaaacagccgtaactccgcatcgtgggatgtttcaaatttctccctctgtttcttaaacttgatattgttcaattccgtatgaacaggttttagccgctggtaattctcgccctcccgtatcaattcctgcaattcctttatccgggcagatttctttttcatggagtcgcttaacgcttcaaattcttcgttgacagaggaaagacgctcctgcaaatcctctaatgtgagcagcttgttttccgtcagataattgacggcttcggcaaactgctttaagtttccggttctggctttattgctccatgcccctgcgttgcgctggttgtaataagcgatcaacaggtcggcaaggctcggtgtctgcggtttggaaagttcttcttttacctctgccatccagacaaacagggctttgatcttcttcctcacatcctgcatgagccggttggtggctttaatccagcggttcagttcccctttctcggtgcggatgccctttgcttccatctgccggacattagctccctcgtggacagtaggtatcaggtcaagcccctgccgcacataggaacggtggtcgatacgcacatccagccctttttcctcaaattttgtattaacggcagccgcccactgctcccgccagtgttccagcgtttccggctcatgccagtctgttgtatggacagcgttaaacatataatcgccgtttttatcccggattcggtttccatcttcatcaagaagatattcccgacgctgtttttgtccccatgtgccatccgggttcaaagggcgcatggttgtcatcacatgaaaatgcgggttagggatgccgccgtcctctttctccgggctgtgaaaagcaaggtcggcaatcatgccttttgtcacaaactgctcctgtacgaacttcctcgccagctccatgttttcttccagcgtcaattcattctgcatggcaatatcaaaggaataggcaagctgtgcttttggatgtttctcgcagttctccacagcattccagagggtcgcccggtcaagatatatttccggcgcatggggcggcagcatgatttccgaagcgatcacgccgccctttttggtgtagtcgctgacttctccatagtagctgctgtaaagacgctccccggctcgataggctgcgctggcaatggcgctctgaccggcgctgcgcttgatctgtgcgattgaaaaatgataaagtgctatccttagtcaccgcctttctcctgcccggaaatacgggcgtggttctctgtggcagaccggatgaaatgctccgcctgcggcagattcaaaatgctttccatgagggaataaaattccgcttcggatagctcctttgtctgtggtgcaatgctctcaatagctgccccacgggtaatcagccggtgcgtcctctgtttccgggaaccgctttccagatacgcctgccggtttttcaaacgctgcattttccgtttttcccgttccagcaggacagtggttttttcatattcctgctttaactgttccaaagatttttccacgttctcacatcctttgctgataagataaagaaagaccatccgcagacagtctgtgtgtcagtgcttctataaaacccgatgaaaagggaaaaccgcagagcggatttctctttgcggcgagtacacaggggatagccgctttagcggcgcaagggggtgtagccaccttgtcggagcgaagcgaacgcagacctcggattgctgattttatcagcggcagaggtaagctccgcaggacgcacgatacatggtctttagactatgtatagaagtgcgcccttagttcctaagggattttgccgtttccggcagtcttgtcctttttcttggaacgcttggaaagatacttcgggcagtcaaccacaaccgcccggaagctctgtttacattcgtgctggcatttccggcacagttcgttgtaagtgatacgactgcggtcatttaagaagaaagaccattccaaccgccgcttgttactcattcttgccataaccggctcctttctccgtttctatctgatgtacgcagataggctgttttgatgtagcgtctcggtatcatttttaaggttttttccctctgtatgcccctttggaaagtgcggcagtattgcagtcagggaatgatacctcacgcttatttgtcgcttctcggtacggtttcggagccttttgccatccattcaaagaaagcagttttgctgaccttgataagcctccccctgcggaacgccggaaagccgggggtgtgtaccagctcataggcgctcgctcttgaaattcccataatccgctgaatgtccgccacatccagaaccagcggtaaatcctcgtagctgttcaatctctttttatcgttcattctgttcctcccataaatcaaataggttaaaatgcttcctgttgccgttctccccaaaagccgttttcctgccccattcctgcggtgtttccctgcattggtgcgccgaatgcgtcacttctcctgccggtcatatcccttttggacggtcattcacttgtcaaggtactgtgtggcacgaaattaccaactgcaatcatcatagcgtactatccttgacaaaacaatgcttctgcgataccatgagtgtaactgatataactaaattatataattaccataaacaaaggcaggggatagggatggagaatcagtttatacggcatgagccatgttttgagaggattttgtttgtcctgacgctggacaggaagaaaatgaaagagcggattttgattggggaagaacagcagatccgcttccgtctgaacgggggccaaaacgcagaggtgctttgtgatatgacacgctcactgggaacttttttgataaactttgagcgtgacatggacagagactggaacttatacgggctttctccgctgcggcaagctctccactccaaccgatggaaacagccggagctggagcaggcggcaagcgaatttctttgggagaaatatcttagcaacgaccctctgaaaatgtatgtggcgttccgtatctggaacagctatctgcttgccagagaacctcgtgaccgtaacgctgcctgtgaccgcttcatggataaaatgagcagcctgaccggggtattccataacgaaaccatgatctttgacagagaaacaggaaaaccgaaacattttcaaactggcagcctttatttcaaaggcgcaccgtcagaagatacccggcttgacctctggttcccggacaaccggcgcacagaagaatgtgtgtctgcctatgcgtccctctaccccttgattacctattatctgaacaggctgaatgactgggggctttgcttccggcagtgcaaggtctgcgggaaatattttctggcaaagagccagcggtatgagctgtgcagcgacaagtgccgaaaagtacaggcgcttcaaaacaagcgggaatttgacgagagggcaagagaaaacaactatgacctgctttataaaaatgaatgccagaactggcgcaacaaaataaaccgagtaaagaataccgcaggctttccggctgaccgtctggaaaaaatacaggttgccttttccgactttaagaaagaagccttgcagagaaaaaaggctgtaaaaacaggaacagccagcccgaaagaatttacggactggctgtatctgcaaagtaatgtaattgtggaactgacagaatactaaatttttttctcgttgtgaggtttctgtgacatttgcctgatggcagtatcgaaattgcagtaattactcatgcaaaatgcttcttcgttttatacactatacctatatggtggagcaccaaatgaaaggagcaaaaaatatgtctgagattcaaaatgcgattgaagtaaagaacttaaaaaaaggttttggtggcagagttttgtttgagaattttagcctgaatgtaaaagcaaatacaatccatgcgattattggcccgaacggttctggaaagacaacactgctacgcttgattacaggggtataccagccaaatgcagggacaatcaacattgcagggaaatatgcaatggagcttgaaaatgactatctgtatgaagaacagactggtcttgaaaatttgaaaatttttgggaaatactttggatttgaaataaatgatcgttcagacggctattgtacgcaattaggattgaccgagcatttaggaaagcgtgttagcacttattctaaaggaatgaaaagaaaactgtcccttttgattgtgattatgataggacgggatattctgctcatggatgaaccaacatcgggtgtagaccccatatccagagtagaaatccgtagtttgatagaagctctaaaagctgacggaaaaacggttattatcacttcacatgaccttagcgagattgaaaagtgcgctgatgatgtatctatgattaaaaatggcagattgctgtttgataagggtattcaagaaatgcaaggacaatcattggaagaaatctttattaaggagggcaatcggcatgagtaatatgggaaaaggcgcaggctactatcttaccagaagtaaaagcctcctaattgatactgcgattgttgccattctggcgatttttatgagctttgcaatgcagatggacaccttgcagtctaagggagaagattatttagtcctaatgctctatgcggttatttttggtcttacctccctgcaatccggtgctatgattgtagatttgacagcaaaggataagttaagccggagaattgaattttttgcagcttctggaattgcagtaaaagagattataaaacagtattcgatacagattttccgcttttctggtattatcccgttctttgtttttatgagttgctattactttaccgactggacaatgagctttgggcggatcgtatgcgtttatcttagtattcttgtacttagtttttgtgagattgtcgctttgaatatcattgtactggatgtaaaacgagtaaaactgttcaaaaatgttctgttctttggtaattttgcactggtttatttgattgcgatgtcggcagaacgaattacagagtttgtgaatcaacatcatataggaattgactatttgattattgtggttgatgttgcactttgcatgatgtttgcactattaagtttctttaaggctcggcacatgagcaacgaaacagtcatcaggagggatggcgaatgggtttgataacattaaaccttaaaagggtattgaactggaattttatatttatgagtgcggtagcagctatcttcggcatgatctctctgatgaactttggggatatttcagaaaacattgtatttggcgttgatataaagtattttatgcttgatggatacctgtgcttatttatcttttttgccggagaaataagcaaggatatgttgcagcaagaaaaaatcacaaagagaatagaatggaaacttgctaatggtattaaaatctcaagtattgttaaagagaatctgctatcactatggattggaacgctgatccttttgtttcctctacttttgataatttccattcgcctgccaaaccttatcttgttattaggcacctattttctgatccttagcatattgtattcggcatttataaatgttttgattctctggattagaaatatgaactggtttaagagtattcctatctttgcaacactgcttcatattttgctggttgtcttaaaatgtgggatatttatgaaaacgaataatgtgtgggtgttgctactattttctccagtgagtataatagttttgactgcgtgtggtttatgtctgatgactaaagaacggatcgtatcatcatattactaacataatgaattttagctgaaaggaggggggtctatgcaggataaacgcttctatccgtatctgtttcttcatgcgggtattgtgactttatgggttatattggatagaatacataaagggattgcgaatgatggagtcatcaacttattgtcgattgccgtcttgctttgttatttcaatctgctctatcttcatgtaatgacatcacggcgagaagcaacaatatccgaatgtggctggaacctgctttctgtttcctttattgcggcgctgatgtatgatggattttccaccttatacacgggtgcatttctggtttttgcattgattatcggaataatgctggtaagaactgacgcaagccggggaaaaatggttcgcttgctgtttggaattgcgtctatcatactgtcgtttttcaatttccgaattctacctgcgataactatgttaattggaatgttcgtgggaattttccttgattataaatatataaatttgaaacaggttaatattcttccgattgcccagaggaaagcaagatatgtccttgttttcatgattcctttgcttacaatcgtactttattgctttgatttgtccaccctgcaagtcaatgtgttttttcagcttataatgcttttatttgaggcctttgctgtcattcatcttggcgacatggaagctcgttacaacgagctgacaaagtattatgaattaacgaactatattgcaagtgagagggaagatttttcaatgctacttcacaacgatgtgcttcaagatattggaggtgccaaaaatcttctgtcgcttcgctcaccagctattgatgaaacaaaaaggatattatctgatttggaactgcgaataagaaatatgatgaatttctattcgtctaatatcttttcggggtatgcttcatgggaacatattgaatatatgcttgacgccattaagaagctgtacccaaagaaaaatatatttatagattttaccattgacagcgaagcaaggattgctttgaaaaaagataacagtttggaacagactatgcagataatcaaagagcttgtcaacaatgtttataaacacgctgccgcttcttttatccatttggaaatcgcgttaaatgaagaaagtaaactcgtaattacctgtcaaaatgacggcgcgaaatcgaatgacattgaaaacattctttcttctaaaggtggtatgctgttcttaacggtgttgataaatgggaatggcggtaacattcagtatttagaaaaagatggtattttaactgcaacggcagttttggggagaaaaaatgaagatattactatttgatgaccacaggatatttggagagagtttaagcaaacttctggaagattgggacgcaatctcaatctgtcactatgtaagtaatgaaacagagttttggaatattctttccgtagacgaatgggacattgtattattggatgttaacctaagagatcagtcaaagaattctggcattgacctgatagaaaaaatatataacaaaaagccaaaaacaaaagtggctatgctatcctcttatgatatgccggtttatagacaggaggcacttaaaagaggtgctgtaagttatattgacaagtcggcttctgctgatgagctggtaaaaaaacttacagctattagtaaaggtcacaaatccattacgccccctttattagatcccctgacagatcgtgaagcggaaattattaaggcgattggaacagggaaaacaaagcatgaaatagcgcaagaactgtatatcagtgaacggacactttacaaccatatccaaagcatctatgataagctgggggctaaaaatgctatcgaagcctataacaaggctattgcacttggatatatcacacccttaatatgagtttaggcaataagagggacagatatatcagaacacaagtgacaagtatgcacattatgtaagcagatagcaaaaacaagtatcattgaacgacttcatcaaaacaataaagaaaagctgggagcaaaattaagtctgcttccagcttttttgtatttgttattgtatgtggttgactaaggaatattgtttaagcgtgagtttgtgatattgggtgtggtatctttaactatgggaaactccgttttcccattttgataccgtctgtcttactacatttagctttacggcaagttcttcttgagaaaggcctttcgcttttcttgcccttttgatgttttcattcaacatatccacgcctccttaggacttgatgcgcttattttaatcgcaaaagggccgttgccgcaagcaacgcatattaacatctatggtctttccgtagaaaaacattgttattctccttacgccttaatatatctcgtcgcccgtcctgagccgattcgttttaccgagccggttttgaccatggcgccgaggacggcttcgacggtcgtggggctgacatcgggaagaattttgcaaatctctgctttggaaagcggcgtcaggctgttcaggacggtcgcttccacacgggctttcttcgtgattttcttgccgtgtaccaccgcaaaccgcttgtccagttccttatagcacatataaagggtggacaggaaattctcgataaaggggaaataggagttctcattcgtttcccatcctgccgaggactgccgcagggcttcgtaataatatgccttgtaattgttgatctgttcctcgaaggacacatattttcctgcgtcaaagccgtttttgtataacagcagcagcgagagcaggcgggacattctgccgttgccgtcccggaacgggtggatgcagaggaagtccagaatcacacaggggatcaaaaggagctgattgatatttgcatcgtttcgtgcatccagataagcaagctccaactgctccattgatttcggcgcttcgctcgcaggggtaggacggaagcggacacgacggtttccgtcagcgtcgatctccagaatcacattgtcgtccgtcttgtactgcccgccgtactcatagcccgcaaagctcatcatcgtttcgtgcagccgcagaatgtcgctctgccggaagtcaatatgttcatagcccaagtggatctcattcagcgcatctctatacccggcgatctccgcctcgttgtggttcagcggggcgctgttctgattgacaatggcggcgatacgctcgtcactggtcacaatgccctcgatggcgttggagcttttgatggactgcacctttgcaacagcttccagctccgtgaagatctgcgtgtattcgtccttgcgcacacccgccattgttttgagtgccgcaatattgaaagtgaggttcacaaggtttgcaggcagcaaaccgttattcaaaaaggagtaatcgaattttctcatacagcaccagcctttctgcacataattatagcatattatatgcagaaaagcaagcaactatatgagttatatgcatatattttccttgaaatatgtgcatataatggaattgtatatgcagaaaacggcacatattctatcgttccggctgctccgtttgccgtttgacttcggtacgctccatcacaacaggcgagctgatccggtattcttcggggatgctctcgatgtcgccgtcgtagatgtccacaaagcggccgccgtttgaccgcacatagccgttatccccgaacacgccgccttcttcataccgaatatcgcgcccaaaactttcatagtcgatataatttgccagtgcgccaaggttgcttgtgtcgtagcatccgctttcctcaatccagtaatagccgaggtcgtagtcactccgcacaccgggcaggtaatcaaagcagtccaaattctcggtcaggttgatcagctcctgcacgctgccggtgttctcacccaagtccaaaaccgcctgccagaaatcgtcactctcccgcagttccatgatctgcccggcgagatagttcagctcgctcagactctcgtattctccgagcaccttgccgataacctcgtccgggcagtcatagtcggtgatgaaccattcctcatagcgccgcccgatgccgatgcgccgaaaaactgcctgcatttcttcattggtcacggggaactccacccattcgcccaccaaaaagccctcgttgtatttgccgaggttggtaataaaggcttcaaaagcgcagtcccttgtatctgctacgtgcatcattgcgtccgtccctcgctttctgccataagaaattgtccgaactcggtaaaggcgtaccagttcgtgcggtcaaagcggttctcgttgaattgcccttttgtgagtacccgccccttgaccagttgtttcagggcgtagcggatctcgtcgtaggacaggaacggaaaaaagccggtcatcatctgcaccgaacagcgcacccagaccttgccttcatggagctgcggcgattcggcacttttctgctcggtacaatcccaaaggaagcaggccagcaccgccgcattaactccgtattttttcgctatgtccgcatcaaagaaatgaaccatattttttcctccgttcgttctgaaaaacaaaaagcagcttttcagccgcttttcggaaaatttccatacagaccacctatagctgtgatctttctttttcgggtagtacagggagtaacagggggtgaggtgtggagaggggggagaaaatttgcgcagccgtttcacttccgcaaaagggcagactttccccaaggcgtcccgctatctttcctgatcgcgtcggcgctgcaaatgccgattgtaaaattcaagtgctcgaatcacaaaatcagtttcctgccctcgcgggatcgatttcggaatgagcctcgttattcgctcgtcgcgaaaagcgggcttttcgcgctggttcggtttttcctcctgcatcatggaaaggatgacttcctccgtcagttttccgtcccggctgaactctttcattttgatggcctgtgcaagcgacggcgtgcagtcctcgcactccatcgtgtcatataggctctgctgctgttctttggagaggtaggaaagctctacggcggggcggaaagcgatcttgccgctgtccaccatgtccagcatcggtgggatcagctcggtcaggcggatatagcgataaatctgtggctgactgtcgccactcttttgactgacctgctgtgcagaggttagtcctttcaacttcttatccagtggagaagaagttaagtctgttctttcaccttgccgttttatggcttccaacttcatcttgtaggcaaacgctttttcggacggtaagatcgtttctcgctgcaaattgctgtccaccatgatgatcgtcgcttcgtcatcggtgagtttgcggacgatgcagggcatttcggtgattcttgccagcgttgccgcacattttcgcctatgaccggcaaccatctcatagccgccgtccgccttggggcggacaagggcaggcaccagcacgccgtactgctttacgctgtccgccatctccgccatagcctcgtcctgcttgaccttgaacggatggttgggaaagtcggagatgtcggcggggttcagcataacgaccttttcaagctgcgcttccgcacgactctcgccggtggagaacaggtcatcgagcggcgtcatccctaaatctctcggttttgagctcaagctccgacacctccttcgtcagcgagcggtatgcggcggcgaccttgccgttcttgtcgtgggcaaagatgctcttgcccacgccacccttttggttcgtcaccgcgatcactttgcaatttgccatatgggttttcctccttcacataaatttagccgcctgcggcgaagcaggcggctatgtaatcgagcaaatatccaattttcagtttaaaatcaactgcggtaaatcgagtgattttcgacttttcttgaagcaaccagttgaaaagtgcagatttgcttgtccgcaaacagcagaaacatatttaacggcgattcttacacagttaatactcatacagaagcaaccgcatacagatttacaattcgttttggcttcatttcttcgatgaaatcagggctttttgagtgttttgcgttatcgggattgcagcgcttttttgcagacttaagttcggtaagactatgtattttaagtccaaaacgcaactgcttgtcctccaagaaaggacaccggagcatttctgtcacgtatgtaggcaccgaagaactcgctcatctcgagatggtggggacaatcgtgtaccagctgacgcggaatttgacgcaggaggaaattcaaaagcaaggctttgatgcgtatttcatcgaccacacgacgggcgtttacccggcagcggcctccggcgcgccgttcagtgcagcgtgcatcgccgtaacgggcgacacgctggcagacatcaacgaagacctcgccgccgagcagaaggcccgcgtaacgtatgacaacatcctgcgctttgcggatgatcccgatgtgcgcgaccccatcaagttcctgcgcgagcgcgagattgtgcattaccagcgctttggcgagggcttgcgcatcgcgactgaccgactcgattccaaaaacttctacgcgtttaacccctcgttcgactaaacaaaaacgggcggcactttttcggtgcttgcccgtttttcctatggcttacggcgaatttgtgacttcttagacgattttgacgcaggattaggaggcaaaataccctgaattttcctgcgaatgcgacaaattcacgggggttcgggcgcaaatttttccgtactgttacaaagatttaatgaaacggcgaactttgcggtaaaacactggagattttctgcacagtgtggtatactaactctgtttaatgcgaaaaagtgcggctttccgcaacggaaaaatttggcagcgtgtgtttggggtgcgggcaaaggccgcacgctatgcgcaaaaatggaacggcgctgcacagaaaggggcgaagcctctgtgaaaaaaagaatactgctcgggctgatctccgttttcaaagcgctgtataacgccgtgtacgccgtcatgaagctgcgccccatgcagaaaaaagtcgtcatgatcagccgccagtcgaacagccagcggccggattttgaacagctcggcgcagagattgaagcgcgtgatccaggggtgcgccttgtgtatctctgccgcgaaatgggcgatacgccgttagagctcctgcgctattgtttccatttgcagcactgcgccgcggagctttccaccgcgcatgtgtgcatcatagacggctactgcatcccggtcagcgtgctgcatcaccgtaaagagctgcgcgtggtgcaggtctggcacgcgcttggcgccattaagaaatttggcaggcaggcgctttccgtgcccggcgggcgcgataaagagcttgcggagcgcatggggatgcataagcactacgatgccgtgctctgtgcgagtcaccgtacagcaaaagcctatgaggaggcgttcggcgtttctgccgataaaatgcgcgtgaccggcgtgccgcgcgtagacgccattttgaaaatgaatcgcgcgcgttgccgccgccgctttttcgcggcctacccggaactgcgcgggcagaagatcgtcctatacgctcctacgttccgcgacggcgagcaaatgcctgagattgagccgcttatcacggcggcggaaaaaatgggtatgctgctcatcgtgcggctgcacccactcgaccgcgagcgcttggagcgccgccgtgtgctgccgaaattccgcgagtgcccggagttcggcaccttcacgctaatggcagtagcagacgccgtcatcacggactattccgctatttccattgaggcgagcctcatcaaaaagccggtgtatttctacgtttacgatttagaacgctacaaggaaacgcgcggcctcaactttgacccgcttgcagagatgccgcactgcgcattcacaaaggccgagcctctggtcgactgtattctccacacgccctacgattacgaaaagctcaccgcctttagaaaagaattcgtggagacggatgacacgaacaacacgcagcgctgtgtggatcttataatgactttccttacagaagggataaaggatagataaaatgaagtcagaatgtaattttgattcgataaaagtcagcgttatcgttcctgtatacaacgttgaagcgtatttggagcgttgccttgattccttagtgaagcaaacgctggaagaaatggagatcattgttgtcaacgacggcacaaaggataattcgcaggcgatcatagaccgttatgccgcagcatatccgcagaaggtgataagcctcatcaaagaaaacggcggactatccgatgcgcgcaactacggtattccgtatgcgcacggtgaatacatcggctttgtggacagcgatgactatttaaacgtgactatgtaccaaaagctgtacgaccgcgccgctgaaacagattcggacattgtggtttgcggctattacggcatagacgaaaataccgaaacgcggcgctttttccagcgcggcagcactctggagttcggtgtgagcctgcacgaaaacccgaagcttctgtacacaaatgcaccgtatgcctggaataaaatttaccgccgcgccttatttgagcgcacggggatacgcttcccgaaagggaaaatttatgaggacattgcgaccatctacccgctgatgctgcatgccaaccgaatctccaaagtaaacgagccgctgtactactatattctaaagcgcgaaggcgcaatcacggcgacattctccgagaacatcctgcagatgtatgattcgctcgcaatcatgaacgaatactatattcgggaaggcgcattcgaggagtttaaagaggtgctcggcttcatcaatttgaagcacacgatcctgcgcttccgcgattttacggcatataaagataaagacctgcagtttaaagtcgtccgtaagggctttcagcatctggatcactattttgatgactggcgcagaaacaaggcgttttttgactttttcttctccaaaaaacggctgatgggcgctttggccaagcacgagttcacgtggtatctttacagcatgatgccgaattccgtgctgcgccttttgggcaaagcggcaaaaacgatgcgcaaggctttgacggttttctcaaagcgcagttatttgaataaatactactacgtgcgcacgtgtaaaaagaagccgctttgcgacaagcaggtgctttttgaatccttccacggtacgaacctaaatgattcgccgttcgcaatgatgcgcgagctggcaaaggacccgacgtttaccatctattacacgtcgaaaaaagagctgatgggcgagcaccggaagatattagatgcgtatgggctgaaccgtgtgcagctcattccgctcggctcgagaaaataccagaagattttggcaacgagccgataccttgtaaataatgtgagctttccaacgtattttatccgccgtgaagggcaggtctatttgaatacatggcacggaacgccgctgaagaccctcggcaaaaaaatggcgatgggcattcaggatatgagcaacatgcagcgcaatttcctgcacagcagctatcttctgcacccgaaccgctatacgatggatcacatgatggaagattacaacctgaatcacctctatacgggaaaggtgatcctgagcgggtacccgcgcaacgcgatattctgggataaagacgcggcagcggcggtgcggaagcaatacggaatggacggcaaggaaacctttgcctacatgccgacttggcgcggcgcgatgagctccggcgcaaacaaaggcgggtacgaagcggaagtgcgcgacctgctgacaaagttcgacagcgcgctgacggataagcagatcatgtacgtgaacctgcatccgcttgtaaaagacaaggtgccgatcgaaggttataagcacattgtaaaattcccggatgacgtggacagttacagctttttgaatgctgtggacgtgctgattacggactattccagcgttttcttcgatttttccatcacgcgcaagccaatcgtgctctttatgtacgactatgatgcgtacatggcagagcgtggcatgtatatggatgtgcgcgatctcccgttccgcaaaatttataccatgaacgaaatgctcgcatacctgcacgaaaatgataagcaggcagacgtgaacagtgcggcgtatgacgcgtattataagatgtttacaaattacgatgcgccggataatatccagaacctgaacgatatgctgttctacggaaaagcgccgaagtttgaagtaatcgattatgccgaaaacaaaaagcggccgcgaaatgtttatcttgtcggaaagaacgaccataagggttgggcgaaagagctggaacagcagctgcattccatggaagcgcccgtagcggttttcctgcgcagggatttcaacgagctcaccctcaaggagctgaccgataaatataacgattggctggattacaccgtgattgatacgcagatgttcctttctttgccggaaaacatcaagctgtttttcagcagagagcgtaatacgtataattgcgatgctgttttcgcgcgggaagtattccgtattttgccgcatctgaatattcaaagtgtaacggcaggcgatgactcttacagaaaccggagcattgagcaagctgtaaaaaacgaaaggaaaggctaaaacatgaaacgagtattgacctacggaacgtttgacctgctgcattacggccacatcaaccttttaaagcgcgcaaaggcactgggcgattatcttatcgtggcgctttccacggatgagttcaacgccggcaagggcaaaaaagcgtttcacgattatgaaacgcgcaaaatgatgctcgaagccattcgctacgttgacctcgtcattccggaggaaagctgggatcagaagatcagcgacgtgaaggactaccatgtggacgtagtcgttatgggcagtgactgggaaaacagcgatcgctttgactacctcaaggattactgcgagctcgttttcctgccgcgcacgccgggcatctccaccacgaagatcaagcacgacctcggacttgtaaacgaaaacgaaaatgccgaagcgctcatgaaccactgattatacgctttcgcaaaaagttatttataaaaatagcagatataaaacacgctcccgctgcagatactttaaagaagtaagcaggggagcgtgaatttttttgagaaaagttggatcaaaaggtttttatcgccgttacagttcgctctgtgttacgccgtcaaatcgacatactcgcctttgacgaagcccaaaagctgatccgggtttacgatgagctgcacgccgcgcataccgccgctgacggcgattgcatcaaacagcatggcggtctcgtcgatatacgtcgggaactccttcttcatgcccacgggcgagcagccgccgcggatatagccggtcgtcggcagcaagtctttcacgtgcagaagctccacggatttatttttgctggctctggcagcttttttgaggtctaattcctccgctacggggatgcaaaacacgacaaacccggtcttatcgccgcgcgcaacgagcgttttgaacaccgtctcatacggcatgcccacggcgtctgccgcgtgtacgcccgcgagatcggtctcctcaaattcatatgtgcgcacctcatagggaatcttcgcgccgtccagcatgcgcatggcgttcgtcttttttacgccggagctcatgcttcaccgagctccttcaggatcatgtcggccgcctgctttgcgcacttgcggtagccttcctcggtcaggtgcagcatatccgggcacttataatagtgctcgccttccttgcacagcgcgtaaaggtcgttcaccgggatgttttcctctgccatcagctttttggcggcgtcgttatacagctccacccactcgttattgtagttgatgctgtccgcctgcgtgccggtgttgtctgccgccatgccgggctccaaaatcggcgtggtggtcgcgaagatgatcttcgcgccgttttctctgcacagcttgatgatgcgctttaagaagtgcacatattcctcaacggggtgcatggcctccgtcatcggagcctcaatgttcatatcccagtagccgttgttccagtgtaccacgtcaaaatgaccgtgatgcttgaacatctggttcgcctgccacagcgtgtacgcagcgaagcggccgttgtcctcggcatcgtaaacgacctcacacttgccgtctaactcttcttttacataatcgtcatagcccatgcgaatggaatcgccgagcaaaagcacttttttcattcagaaaacctcttttcgggtagatttgccaatagaattatactgccaaaatcttgaaaattcaagatgctttcggcagtatacaaaagggcgttgcgtttctctgaaaaacgtggtatactctgcttatttttctaaaaggatcgaaaaaaggagctgtgaaaaatgggcagatacgatgaaattttggcgcgttttatggcatttgccgagcgtgagccgcgcattttgatgggcgtgcaggtcggttccggcgtgcggaaagaccgcccggcagacgcctacacgacgcagtgggtgcggaaagcatttgaaaattaaacccgccaaacacagcaaaacggcaccgatgaaatttgtcaccggtgccgttcatttttaggttaggggaaaagctgacttacttcttttcctgaatgtacttgtcgatcgcagctgcggcggtcttgcctgcgcccatggcgaggataaccgttgcggcgcccgttacggcgtcgccgcctgcgtacacaccctcgatggaggtgaggccgtgttcgtccgcgatgatctggccgcgcttctgggtctcaagacctggcgtggtggctttcagcagcgggttcggggaagtaccgagggacatgataacgcaatccatcggaatatcgaattcgctgccctcaatgacgatcgggctgcgtctgccggaagcgtccggctcgccaagctccatttttacgcagcgaataccggcgacccagccgtagttcgggtcacgcgggtcggcgacgtccgtcggtaaaatctctaccgggttcgtcagcgtatggaagatgatgccctcttcctctgcatgctccacttcctccttacgtgccggcagttctgccatgccgcggcggtagatgatgtacacgttctccgcgccgagacgctttgcggttctcgcggcgtccatggccacgttaccgccgccgacgaccgccacgttttttgcgtgctggatcggcgtagtggaatcatcgcggtaagccttcatcaggttgctgcgggtgaggaattcgtttgcggagtacacaccctttaggttctcgcccgggatgttcataaagcggggaaggcctgcacccgtgccgacaaacacggcctcgtagccgtactcgtccttcagctcttcaatcgtcaggatacgaccgataaccatattggtctccaccttgacgccgagcgccttgaggttatcgacttccttctgcacgatggacttcggcagacggaactccgggatgccgtacacgagcacgccgcctgcaaggtgcagcgcttcgtaaatcgtcacatcgtagcccagctttgcgaggtcgcccgcgcaggtaagacccgcagggccggaaccgataacggcaaccttgtggccgtttttcggcgcggtgatggtggcaacggtagcgtgtgcgttgtgccagtcggcaacaaaacgctccagacggccgatgccgaccggttcgcccttaatgccgcgcacgcacttgccttcgcactgcgtctcctgcgggcagacacggccgcagacagccggcagggaagaggactgcgcaataacctgatacgcgccctcaaagtcgtgctcggcgacctttttgatgaattccggaatatgaatattgaccgggcagccggaaacgcacggcatgttcttacaattcaggcagcgctgtgcttcgtccagcgccatttcttcggtatagcccaacgtgacctctttaaagttcttgttgcgaacgttcgggtcctgcgagggcatagggttctttgtcattctcatgttaggcatgatcactcaacctccttcttgaacaggttgcaggcttcctcataagcgtggcgctcaaaagaagtgtagctgcgggagcggctcatcgcctcgtcaaaatcgacctcgtggccgtcaaagtccgggccgtctacgcaggcaaacttcgttttgccgccaacggtcaggcggcagccgccgcacatgcccgtgccgtctaccatgatcggattcatggaaacaacggtcttctggtcgtattcttttgtggtgaggcagacgaacttcatcataatcagcgggccgatggcgatgacctcgtcaaaacgctcgccgttttcaagcagcgtcttcagcggggcggtgacattgcccttttcgccgtaggagccgtcgtccgtcatcagcgtgaagtggtcggagcaagccttgaattcgtcttccagaatcacgagatcctgattgcggaagccgatgatagaggtgacttccgcgcccatggcgtgcagctcttcggcaatgggcagtgcgatggcgcagcctacgccgccgccgataacgcagaccttcctaaggccgtctacatgcgttggtacgccgagcgggcctacgaagtcgtgcagacattcaccttcgtttaagtggttgagcttttcggtcgttgcgccgacaatctgaaaaatgattgtaacggtgcccttttcgcggtcatagccggcaacggtcagcgggatacgctcgccgttttcgtctacgcgcagaatgataaactggccgggctttgcttttttcgcaatgagcggcgcctcgatctccatccgcgtcaccgtggggttcagcggctgttttttaacgatcttatacatacttcaaaacctttcccttcaggcatgcgcgcagtttgtgcgattttgcctaagttttgtctgtgtcggatgccggttttgcaatttttgcctttaaaacctgcaaacgatactattataacagagaaatatcaaaattacaacgggaaaagacaggaaatccctgccgtgcggcgatttccgaagaaataccgggcggcagggataaaatgtccttttaccggacagatgcccgggatgcgttatagattgtctttatagacttagaagtcaacttccgtgtcgtagtagcagcacttaagcagcttttccatctcctcctggctgggctgacgcgggttggaaccggtgcaggcatcggcgatagcgttctttgcaatctccggcagtctctcaaggaaggcgttctccggcacaaagccgttctcggtcgggaagctgtccgggccgtagtgcttgatgcagtgcggaatgttcagctcgtcgttcatgttgcgcaggtactggatgagcagctgtaccttctcgtcgtcgttgttgccgccgaggtgcatgtagtcggcgatgacaccgtaacgcttctttgcggtctcgtcctttgcgttgaacgcgatgaccttcggcagatacatagcatttgcagcgccgtggatgatgtgtgcgccgtaatcggcaaacgcagcgccggtcttgtgtgccatggagtgtacaataccgagcagagcgttggagaacgccataccggccaggcactgtgcgttgtgcatgttgtcgcgggcggtcatatcgccattataggacgggataaggtccttcatgatcatctcaattgcgtggatggcgagcgggtcggtgaaatcgcagtttgcggtggaaacatacgcttcaatcgcatgggtcatagcatccataccggtgtgcgcaacgagcttcttcggcatcgtctcggcaaggtccgggtcaacgatggcgacatccggggtaatctcgaagtcagcgatcgggtacttgatgcccttctgataatcggtgatgatggagaacgcggtcacttccgttgcggtgccggaagtagaggaaatggcgcagaagtgtgccttctggcgcagcttcggcaggccgaagaccttgcacatatcctcaaacgtaacgtccggatattcatatttgatccacatagcttttgcggcatcgatcggagagccgccgcccatcgcgatgatccaatccggctggaactcgatcatcttctgcgcacccttcataacggtctcaacagacgggtcggactcaatgccttcaatcagctcgacctccatgccggcttccttcagatagccgactgcacggtccaaaaagccgaaacgcttcatggagccgccgcctacacaaacaacagccttcttgccttcaaaatgcttcagttcttccaaagcacccttaccatgatacaaatcgcggggaagtgtaaatcttgccataagtctatcgccctttctatgtgaagcaatttatcgcaaagctcggtgatttgcaccacctaacttctttttacgactgtattgtatatcaaaatttttgatttgttaagtgctaaatttgcatattgatatttctatatcgatatatatgcactaaaaatgaacagagtgttagggaactattttgttgtgtttcacagagagtttgataataaaatgtcacgcagaagaaatacacattctgcgcgacatttttaatttgcttatgaaatttgtttcacggtgcgtatactatatgtaaatacggtattgtcctcgcgcggattcggcacaagctccgctgtgaagatcgcctgcggttctgcattgttttcgtcgcggatgagcgctgccgtcacggtgtacacatctccgcttttcacacagtcttgtatgtccacggaaaagccgccgccgcttataggccgcgcataggtgtcgctgtccgcatcgtacgaaatctcacccgaaagcgagtcgggaatatccggcaggtcttcatttgcggcgctttcgaatagtccgctcacaatttcttccatcaccccgcgggagagcaccagcgcgctgccggtcgtctctgcgctgtaaaacgtcatgccgcagttgtccaccgcaaaggccgcggtctgccaaaagtaaacgggatcattcgcgtcaaacgccatgccgttcatctgcgccagaatgtgtgcttccaaaagcggcgccatcgcttcaatctccgcggtgatctctgcgttttcgcttacctcgttgctttccggtgcgggagatgcggtggattttaccgtcggctcggcggtaggcgatgccgttgcggtcgcttcgggggaaggcgtcggcgtttccgctacgtgctctgaagccgccgcgctgctcatactttgtgtgtgttccgctgtaccgcaggcggccgcagagagcgcaagcgccgcagaaagcacggaagctaaaatcgtttttctaagctgcatgtggttttcactcctttcagccgttttttagtataagacacttttagcacaaaactgtgaacgccgtttgaatttcgtgcattgtgcagaaatttttcatttccgtgaacatttcggaaatacgctttacaaatcggggtctgtcatgtaaaataagtataagtataaatctgtgcatttgcaaattgaagaaatttgcgagtgtgcgtcacaggatatggaatactaaagaatcgaggatgaacgtatgaatttaaagtacaaaagagttctcttaaagctcagcggcgaatcgctttccggcaagatcggtcacggcatcgattttgacaccgttgtcaagatctgcgagcccatcaagaagatcgtggatatgggctgcgaggttgccatcgttgtgggcggcggcaacttctggcgcggcagaagcagcggcagcatggaccgtacccgtgcagaccacatgggcatgctggctacggtcatcaatgcgctcggcgtggcggacggcctcgagcaggtcggccttgatgtgcgcgtacagacagccatcgccatgcaggaggtcgcagagccgtacatccgcaaccgtgcggtgcgtcaccttgaaaaaggccgcgttgtcgtgttcggctgcggcacgggtaacccgtacttctccaccgataccggcgcagcgctgcgcggtgcagaaatcgacgccgaagtcatcttaaaggcgaccatggttgacggcgtttacgacagtgacccgaagaagaacccgaatgcaaagaagtacgatcatctcacgtatatggaaatcctcaatcagaacctccaggtcatggatatgacggccgcttccttctgcaacgaccgcggcatcccgttccttgtgttcagcattgaggacccggagaacatcgtccgcgccgtctgcggcgaaaacgtcggcacggtcatcacgaaggactaaagctttttaggggagaagccttgtgcgccctgataaagagcacacaaaacgtataatgaaataacagataggagaatatacttatgaaggaagtattggcaaaagcagaaagcaaaatgggcaaaaccatcgcgagactcgaaagcgactacgccgccatccgcgcaggccgcgcaaacccggctgtgctcgataaggtcatggtcgattactacggcgcacccacgccggtcaaccagcttgcagccgtttccgttgcggaggcacgcgtgctgaccattcagccgtgggacggttccgtctgccgcgccattgagcgcgccatccagacctcggacatcggcatcaacccgcagtccgacggcaagaccatccgcctcattttcccgccgctcaccgaagagaagcgtaaggatatcgtgaaggacgtcagccacatggcagaagaagcaaaaatcgccctgcgttccatccgccgcgacgctatggaaaagctgaaggcgatgaagaaagacggcgaactgaccgaggacgacctgaagcaggcggaaaagaaaacgcaggagctgacggataagtacgtaaagcaggcagacgaacgctctgccgcaaagcagaaggaagttctcaccctgtaagcaaaaggaaggctccgaaatggcatttggaagtaaagaaaacaaaacgcccgtgcaggtgccggcacatatcggcatcatcatggacggcaacggtcgttgggctaaaaagcgtggtctgccgcgtacggcgggccacacggcgggcgcgcagaatttccgcaccatcacgcggtatgcatcgtctatcggtgtaaaatatctcacgctctacgcgttttccacggaaaactggagccgccccgctgaggaagtctctgcgctgatgaagcttttccaccagtacctcgaggaagcgttgcgcgactttatggatgagaatatccgggtgcgctttatcggcgatatttccgcttttgcgcccgacttacaggcgctcattcatcgcgtggaggaagcgagcagcgtgaagaccggcatggtgctgaacctcgccatgaactacggcggccgtgcagagatcacccgcgcggcacgcattttggcagagcgcgtcaaaaacggcgagctttcgcccgaggacatcacggaggaaacgctttccggcgctatgtacaccgccggccagcctgacccggatctcatcatccgtccaagcggcgaagagcgcatctcaaacttccttttgtggcagagcgcctacaccgaatttgaatattttgatattctctggccggatttcaagccgaagcacttggacgaagccattgaaaagttcaacagcagacaacgccgtttcggcggtgtatgattttttgcagtgcgggcggtatatgccgccctgtaccgcgtttctattacattccgaacggtgaaaggaaaccacaggtatatgaaggacagagttttatccggtgtcacgctggtcgcatttttcatggcaatcgtcgtgttcaaccgctcttttccgctggcactcaatattgccattgcgtttatctccgcgctcgctgtttttgaagtcatcaaggcgctgggactttccgaccgctggtatatcacggttcccagcatgacagctgacgtgctggtgcagttctgtgaatttcagcaggcaaatatctttatttattccgcgttcacggcgtgcattttctgcgcgctgctgcgccaccaccgcgagatcacttttaaagaaatggccgttgtgtacagcatggtcgttttgatcccgctcgcgctgcagactatcgttctggtgcgcacgttgagcgaccagcacggcatgttctacgcgctcgtgtgcgtattctccgcatggattccggacgcaggcgcgtttttcgccggcaagctcttcggtaagcacaagctgtgcccggagatcagccccaaaaagactgtggagggtctcatcggcggcgtgttgtccagcgtcatcattttgcagctcgtgggtctcattttcacctacggtatttacggcggcgaacgtcaggcaaactggctctcgctctttatcatcggctttttcggcgcgtttgtgtccgtgctcggcgacctcagcttttcgctcattaaaagaagctgccacatcaaagatttcggcagtgtcattccgggccacggcggcattttggaccgtttcgacagcgtgattttcaccgcaccgtttgtctacatggtaacgatgctgctgccgatcgtgtcgtaagaaaggatgggtctgcatgaaaaagttagctttgctcggctctaccgggtccatcggcacacaggcgctcgacgttgtgcgctgtatacaaaaggaaggggagcacgccgttaaagtggaggcgctcgctgcccattccaatattcggcttctggaagagcagatccgggaatttaaaccgcaagcagttgcggtttttgatttggaagctgcttctaagcttcgcgccgccgtccgcgacctcaatgtgaaggtgtacagcggcatggagggcctttgtgccctgacggagctggaaagcgttgatatcgtcttaaactccgtcgtgggcatggtgggcctcaagccgaccttaacggcactcgaagccaaaaagcagatggcgctcgcgaataaggaaacgctcgtcgcaggcggttcactcgtcatgaagaccgccaaggaaaacggcatcgaaattctgcccgtagacagcgagcattctgctattttccagtgtttgcagggtatgtacaaaaagtgcgacttaaataaaatcatcttaacggcgtccggcggtccgttcttcggcaaaaaagccggggagcttcagcatatccgccccgcagacgccttaaaacacccgaactgggacatgggtgcgaaggtcaccatagacagctccacgctcatgaataaggggctcgaattcatcgaagccaagtggcttttcgatatggagccggacgacatcgatgttgttgtgcaccgtgaaagcatcgtgcactcgctcattgagtataaagaccactccgtcatcgcgcagctcggcgtgccggatatgcgcattcccatccagtatgcgcttacctacccgcgccgcttcccgtcgcctgtaaagcagttgaatttggccgattggcagaagttgacgttctatgcgccggacgaagaaacctttacgtgcttcggcgcgtgcaagcgtgccattcgccgcggcggtacattgcccgcagcggtcaacggtgcaaacgaagccgctgttgcgctgtttttaaaagaaaaaatcggctggcaggacatcggcgagctcgtgtgccatgtagccgatacatttgaaaccgcgcccgttacaagcgtggaggacgttttggaagctgaccgcaaagcgcgcgcctatgtgctggagcgctgcggggagagcgcaagatgagcacggtggtgcagggcatcctgctcgccgttatcggcgtattgctcttcgggctcatcattttcatccacgagttcggccactttttcacagcgaagctgagccacgtgtgcgtcaacgaattctccatcggcatggggccaaagcttttctcgttcacccgcggtgaaacgcagtattccctgcggcttttgcccatcggcggctactgcgccatggagggtgaggacgaaaaaagcgacgatccccgcgcgtttggcaaccgtcccgtttggcagcgcatgatcgtggtcgcggcgggcggcatcatgaatatcctgcttgccgttttgctgatgatggtcatctgcggacaggaagaccgctacgccaccatgcagattgccggctttgcggaaaattctgcgtttgaagccgccggcgtggaggtgggcgacgtcatcacctccatcgacggctacaccgttcgcacagggcaggatctttcctttgctttaagtatggcggcgcttgattccacagacggcaccgcggcgcttgacctcaccgtaaagcgcggcgaagagaccgtcacctttaacgatttgaccatcaacacaacatctgcggacggcaagcagtaccgcgccgtgctggatttctacgtgttgggcgaagaaaaaacgccgtggacgctcatcaaaaacgcgtttgcggatacgtactccaccgtgcgcatgatcttcaacagcctcatcggcatggtgacgggccgcttcggctttaaagagctcgcaggtccggtcggtacggcgcaggcagtcacgcaggccgcaagcgcggggcttaagcagagcttcggcgcggcggtcaacaacatcgtgtacatcatgcttgtgatctccgtgaacctcggcatcgtgaatttactgccgctgccggcgctcgacggcggacggcttgtgttcctcatcatcgaagcgatcttccgcaggccggttccggcaaagtacgaacgatgggtgcacgcaggcggctttgcactgctcatctgcctgatgctcgccgtcacgttccaggacatcatgcgcatcgcaacaggcggataagggaaaggacgatacaatgaaacgtatttcaaaacaggtcatggcgggcaatgtgaaaatcggcggcggcgcgcccgtcaccgtgcagtccatgctgaacgtgccctccaccgatatagaaggcagcgtgcggcaggcggtcgcactggaaaaagccggctgccagattctccgcgctgccatccccgatatggatgccgtgcggctgatccccgccatcaaagagaagatttccattccgctcgtggcggatattcatttcgattataagcttgcgcttgaagctgcagcggcgggcgtggacaaaatccgcatcaatcccggcaacatcggcggcgatgaccgcgtaaaagccgtcgcgaccgtgtgccgcgaaaagaaaatcccgattcgcatcggcgtcaattccggttcggtcgaaaagagcatcctcgcaaagtacggcgcgcccacagcggaagcgctgtgcgaaagcgcactttaccacgcgtctttgctcgaaaagttcgatttcacggacatcgtcatctctctgaaatcctcctcggtcgatacgaatatcaaggcgtatgaaaggatcgcggagcgctgcgattacccgctgcacctcggcgtgacggaaaccggcacgctgcgcatggggatcgtcaagtccgccatcggcatcggcagccttttgcagcgcggcatcggcgatacgctgcgcgtttccctgacggccgaccccgcagaggagattcgcaccggccgcgatattttgagcgcgctcggtctgcgcggcggcgtaaagcttgtttcctgccccacctgcggcagaacacgtatcgatctcatcggccttgccaataaggtcgaaaaggcactcgaatacgttgataaggacatcaccgttgccgtcatgggctgtgttgtcaacggccccggcgaagcgcgcgaggccgacctcggcgttaccggcggcaagggagagggcctcattttcaaaaaaggtcagatcatccgcaaggtgccggaagctgagcttctggacgccctgatggaagagatcgacaagctttaatttgcaataaaacaggctgtgccgggcggtacggcctttttgcatcatctcacaccataaaaacacagaccattctacataggagagatgcgcttgaaaacattaggcgatctgctgaaaagcgccggctatacgccgaaagacggcgtcgctgccggtcagatcgaaaaaatagagatacacagggaaaaccgtttggtgcgcctgaaaacgaagtttgaagccttcgtgccgtacagcgacctgcgcgaggtaaacggtatgctgcacgagcgcattctgcctgatatgcgcgtggagcttgcccccgcattccccgctcaggcgtggcaggaaagctgcgttacctccgttttggagcgtgtgcgcgagctcgacgcaagcttaaacggcacatttaaagacgcaggctgcaccataaacgaaaatacccttacaatagagctgctgcacggcggactcaatctgctcgaaaagcgccataccgaccgcgccatcagcgaaacggtgcaggagtggttcagcgtgcccgttacggtgacgttcacgggcaaaacagagctgcaaaacggcgacgaatccgtcatcgagcgattgcacgtcgaggaagaaaagcgtgcgcgcgccgccgtcatcgaagaaatggaccgctacgaagccgccatgaaagagaaagctgcgaagtgccgcgtcagtgtgcgcgagggcaaatcgctcatgccgcagatcattctggagaccgcgcgccccattctcggcaatctgccgaaaaaggagccggtaccgatttccgaagcgaccatcgaagccggacgtatcaccgtttggggcgaggtgttcgacatcgaatcccgcgaaacgcgtgacggctcccgcaagatttattccatcgacattaccgattacacaaattccatcacgttaaagctcattcagcaggcgaacgactgctcaaagatcgatgccatcaaaaagggtacggcgctgctcgtgacgggctccgtggagtacgataaatacgaccgcgaaaacgttatgcgcccgaacgccattgcccgcgcggaaatggtggaggtcgtcgataccgccaaagaaaagcgcgtagagctgcacctgcatacgaacatgtccgccatggacggcatgacccccgcaggcgagcttatcgaccgcgcctataaatgggggcaaaaggccctcgccatcaccgaccacggcgtcgcgcaggcgtttccggatgccatgaacgcgtggctcaagatcaagaagggcggcggcgaattcaaggtcatctacggcgtggaaagctactttgtaaacgacctcgtgcccgccgtcaccggcgagaccgataagccgctcaatacggattacatctgctttgacctcgagaccaccggcctttcttcgagcaaagaacgcatcacggagatcggcgcggtacgcgtgcataacggcgaaatcaccgaatctttcaatacatttgtcgaccccgaaaagcccattcccgcaaagattacggagctcaccggtatcacggatgaaatggtcgcgggcgcaccgaaagaggaagaagccgtgcgcaaattcttcgagttctgcggcgaagacgtgattcttgtcgcgcacaacgcaaattttgatacctcgttcctgcgcgccgtgtgcagccgccacgacatgacgttcccgtatgtgtacatcgatacggtcgccatgtgtcgctccatgctgacggacatcaaaaattgcaagctcgatacggttgcgaagtatttaaagctaaagccctttaatcaccatcgcgcgtgcgacgatgccgccgtgctcggcgagatttttatcaacctcatccagcgcctcgtcgatgatttcaagctgacagatgtcaagcagatcaacaccgcactcgcgggcggcgacccgaaaaagctgccgacctaccaccagatcattctcgttaagaacttggtgggtttaaagaatctctataagctcatctcgtttggccacctaaattacttctataagcgtccccgcacgccgaaaagcgttttgaaccagtaccgcgagggcctcatcatcggctccgcgtgcgaagcgggcgagctgttccgcgccattacgcgcggtgagccgtgggaaaaattactcgagattgcttcctactacgattacctcgaaatccagccgcttggcaataacatgttcatggtgcgcaacggctcatgcgatatcgagcagttaaaagagtacaaccgcaccatcgtaaagctcggcgaaaagctgaaaaagcccgttgtcgcaacgggagacgtgcacttcaaagacccgaaagacgccgcaggccgcgccattttgatggcgggtcagggcttcacggatgccgatgagcaggcgccgctctacatgcgcaccacggacgaaatgctgaaagaattcgactacctcggcaaagaaaaagcgtatgaggttgtcgtcaccaatacgaacaagattgccgatatgatcgaggaaatccgccccatcccggagggtgttttcccaccgttcatcgacggcgcagaggagcagctgaactccattacgtgggcgcgcaccaaggaaaagtacggtgacccgctgccggagattgtcgaaaagcgattaaagcgcgagctcggctccatcaacaagcacggcttctccgttttgtacatgacggcgcaaaagctcgtggcagacagcgaagcgcacggctatctcgtcggctcgcgtggctccgtcggctcgtcgttcgtcgcgaccatgtccggcatctcggaggtcaaccccttggagccgcactacatttgccccaagtgcaaatacagcgagttcatcacggacggcagctacctttccggctttgatctgccgccgaaaaagtgcccgcgctgcggcgaagatctcgaccgcgacggccacaccatcccattcgagacgtttctcggctttgacggtgacaaaacgccggatatcgacctcaacttctccggcgaatatcaaagcggtgcgcaccgctatacggagacgctgttcggccgcgaaaacgtcttcaaggccggcaccatcgcaaccgtcgcggataaaaccgcgttcggctacgtgaaaaagtatgccgaagagcgctcccgcgtgctttcccgcgcggaggaaaaacgcctttccatttcctgcacgggcatcaagcgcaccacgggccagcacccgggcggcatggtcgtcgtgccaaagggcaaagaggtctacgatttctgcccggtgcagcaccccgcaaacgaccagaattccgataacatcaccacgcacttcgacttccattccattcacgataccatctgtaaactggacgagctcggccacgatgtgccgaccatctatcgctatctcgaagattacacgggtatccccgtcatgaaggtctccatgagcgacccggcggtcatgtcgctgtttacgtctacggaagcgctcggcgtcacgccggaggacatcggctcgttgacgggcacgttctctctgccggagtgcggcacgccgttcgtgcgccaaatgctcatcgatgcccagccaaagacattctccgaccttctgcaggtctcgggtctgtcccacggcacggatgtttggatcggcaacgcgcaggacctcatcaaagacggcacctgcaccatcgccaccgtcatcggtacgcgagacagcatcatgacctacctgctcttaaagggccttgagccgaaaatggcgtttaagattatggaaatcacccgtaagggcaacgcgaaaaagctcttcacgcaggagcacatcgccgccatgaaggagcacaacgtgccggattggtacatcgagtcctgctataagattaagtacatgttcccgaaagcgcacgctgccgcctacatgattgcgacgttgcgcctcggctggtacaaggtgcattatcctgtggaatactacgcggcgtacttcaccgtgcgcagtgaagatttcgacggcgccaccgccgtgcaggggcgtgccgccgtgcagcgccgtatgcgcgagctggagcagaagcaaaaggagcaccagtccactgtcaaggaagacgcggcgtattccacattccagatcatcaacgaaatgctgtgccgcggcatcgagcttttgccggtcgacctgtataaatccgatgcgaaaaagttccttgtcgaagacggcaagatccgtctgccgttctcgtccctgcccggtgtgggcgaggcggcggcgcacagcttgtatgaagcgtgcacgggcggcgaggagttcatctccatcgacgaagtgcagtcccgcgccaaggtatccagcgctgttatcgacgttttaaaaagcgccggcgcattgcagggtctgccggacagcagccagacatcactgttttaatgccattaggcggatgcaagaagttgcttccgcctttctgcatatctatgcgtatatacatgtatacacaaaacgcgaaaagtcttgacaagcgcacagttacatgatattattgtaacacgtcattacattaaagcaaaaggacggtcgttatgaagaagttcaacaaaatcacgccggagggcaccaaggatattctgtttgaagagtgcctttcgcagcgtaccgtgagcgaacggctcacgcatatattcaaaatgcgcggctataatgaggtcatcacgcccggcatggaatactacgacgtgttcgatgccccaaacgccgccattcctcagtatgagatgtataaatccacggataacaaaggcaggctcatcgtgttccgccccgatttaacactgcccatcgcgcgccttaccgcaacgcggttgcaggcgatggaaaagcccattcggctttactataaccagccgatctatcgcaaccgcaaggacctttccggccgcagcgacgaaacaacgcaggcgggcatcgagcttttgggtgcatcggggctgaaagcggatatcgaggttatcgccgccgctgttgaggcgctttccgcgtgcacggaaaacttccgcttggagatcggcagcgcaaagttcttcggtgcgctcgccgatgagctgcccgtctccgcagataaaaaagaggacatccgccagacgattgagtccaaaaactacgccgctctcggcgatatgctcgacgcactccccaaatccgtgtataccgaagccatcaaaaagctgccgcgcctgttcggcggggcagaggtcttcgcggaagcggagcagttctgcaaaggccaccccgtgctttccgaaacgctcgattatatgcgcacgctatatactgcgctgtcgtcgctcggcctcgatgaccgcctgatggtcgatttcggccttgtgcagcgcaatgattactacaccggcgtcgtgttcagcgcctatgtggaaaactacggtgacgccgttttgatgggcggccgctacgatacgcttttaaagcaattcgatgcccccatgcccgctatcggctttgctgcaaacgtcgatgcgttggcttctgttttgctcgacgacggccggattgaaagcgtgcccacgccggacgtgctcgtccacgcggaaagcggcgcggagatcaaagcacagatgaaaattcgcgagctgacagcaaacggcaaaatctgcgaaagctccgtgttcgatacggtagacgaggccgagcgctacgcaaagcgccgcggcattccggaagtcatcgtccttagaggggaggaaaacgcatgaagccattaagaattgccctcacaaaagggcgcctcgaaaaagacaccgtgaaccttttagagcagatcggccttgattgcacgcaagtgcgcgaaaaaggcagaagactgattcttcccgttggaaacggcgagatcgaagtcgttttagccaaagctgccgatgtcatcacttacgtcgaaaacggcatgtgcgacctcggtgtcgtcggcaaagataccatcatggaaaacggcagtcatttttacgaaatcttagatcttggcttcggccgctgccgctttgcgctcgcttgccgcaagggtacggattttttcggcggctacaaagcgaagaccgtcgcgtccaaatacccgaacgtcgcacggcagttttttgaaagccgcgccatggacgtgcgcatcatcaaaatcgagggctccgtagaactcgccccgctgctcggccttgcagacggcatcgtcgatatcgtcgagaccggcaccaccttaaaagaaaacggtctggaagtcacggagaccatcgccggtatctcggcgcgtctcatcgcaaacaccgccagccttaaaatgagaaagcaggagattgaagcgcttgccgcccgcatggaagcgcagatcgaaaagaacagggaggagaaatccgtatgatccgtattgccaaaggcgatagagcctactgtgaagcgtttattcaaagccttaaagcccgcgtcagcgaaaacgaccgcagcgtagaggataaagtggccgaaattttgaaggacgtgcgcgataacggcgacgaagccgtgcgccgctatacgatgaagttcgacggctgggcgccggagaaagcggagatcacaaaagaggagatcgatgcgcttaccgcagactgcgacccggcgtttatcgcttcgatggagcgcgccgcagaaaatatccgcgcgttccacgccagacaaaagcagcaaagccgcatcgacccctcgcccacgggtgttctgatgggtcagcgcgtgcgcggcctgcacagggtcggcgtgtatgtgccgggcggtacggcagcgtacccgtcctctgttttgatgaacgttatcccggcgaaaattgccgaagtcggcgagatcgtcatggtcacgccgccgggacgtaccggcaagccggataaaaacattttggccgccgcaaggattgccggcgtagatcgcgtgttcctcatcggcggcgcgcaggccgtcgcggcgctcgcctacggcaccgagaccgtcccgaaggttgataaagtcgtcggccccggcaacattttcgtcgccacggcaaagaaattactgtacggcaccatcgatatcgacatgattgccggtccaagcgaaattctcgtcattgcggataaaaccgcgaagccggagttcttggccgccgacctcatgagccaggcggagcacgaccgcatggcgtccgctattctcattaccccggaggaagaccttgcaaaagcgaccgctgcggagattgagcgccaaatgcagacgctttcgagaaaagacatcattaaagaatccatcgaaaatttcggtgcaattattgtctgcgaaaacatggcggaagccgtcgatttcgcaaacgagctcgccccggagcaccttgaagtctgctgcgaaaatccgctcgaatacatcggcaagctcgataacgccggttccgtgttcctcggaaactattctccggagccgctcggcgattacttcgcgggtccaaaccacgtgctgcccaccagcggcacggcgcgtttcttctcgccgctttccgtcgatgattttatcaaaaaatcgagctttatctactatacggaagcggagcttctgaaagctgccgacgacatcatccgcattgccgagaccgaagagctgaccgcgcacgcgaattccatcgccgtccgcaagaaaaagtgaccccggaggtagtttatgtatacgctgaatgaaaagatccgcgatttagagccgtataaacccattgcgggcgagtataaaattcgtctggacgcaaacgaatcgttcctgtgcctgccggaatccgttatggcgtccgctttgcacgccatgatgagggtggaactcaaccgctatccggatcccaccgcaaaagacctgtgcgccgcctttgccaaaagctataaggtaaagccggcgtgcgttgcggcgggcaacggcagcgatgagctcatcaacgtcattttccagagctttctgatgaagggcgagacctacgcgacgctcacgccggatttttccatgtatgatttttacggctacgtttcggaatgccgcggcatcgaaatcaaaaaagacgaaaatttcacaatcgatattgacaaggtgatcgaaacctgcaacaatgagaacgtaaagttgctcattttcagcaacccgtgcaatccgacgtccgtcggcctcacgcgcgaagccgtgcgcaaaatcatcaggggcgtctccgcgctcgtcgtgctcgacgaagcctatatggacttctggaacgaatctatgctcggcgaatttgaaaactacgataatttactcatcttgaaaacgtgctccaaagccttcggtctcgccgcgctgcgcgtaggctttgccgtgggcaacgaaaagcttgtccgcgccatcaaggctgtaaagtcgccgtataacgtcaacacctgctcgcagaaaatggcggaagccgtgctgaaaaaccgcgcggaagccgatgccgccatccgcagattgctgctttcgcgagacgaattgcagcagaaattcgaccgcatggcgcagcgcttcccggaaaagctccaaacggtaaagagcgttacgaacttcgtcgttctgcgcacaccgtacgcaaaggagctctacgagcgccttttggccgaatccatcgcggtgcggtactttaaaaacatgtccgccctgcgcatcacggcaggctccacgggcgaaaacgcagtggtcacagagcacattcagcggttctttgaagaaaaagagcaagcgtaaatcgggctttaggcccttttagggggaaacgatatggaacgtgcggcaacagttgtgcgccaaacaaaagaaacgaacattgagctgaccttggggcttgacggcggcgaggttgtcgtcgataccggcgtgggctttttcgaccacatgctcacggcgcttgccgtgcatggcggcttcggccttcggttaaaagccgagggcgactggaatgtcgattgccaccacacggtggaagataccggcatcgtgctcggccgtgcgtttaagcaggcgctcggcgaccgcagcggcatcgtgcgctacggccatgccatgatccctatggatgaagcgctcggcttctgcgccgtagatgtcagcggccgcccgtaccttgtgttcgacgctgcgttcccgcaggagcgcgtcggcgattttgacacctgcatgacggaggagttcttccgcgcgcttagcgataacgccggcttcacgctgcacctgcgctgcccctacggcaaaaattctcaccatatgatcgaagcgctgttcaaagcctgcgcgcacgctctgtgcgatgccacagcagaaaacagcaccggcgcggtgctttccaccaagggcacgctttcggaataatttgaaattttaacttttttgcatacacgataatttggaatgaataaggaagggatataacatgatcattttaccggcgattgacctcaaggacggcaaatgcgtccgcctgttccaaggcgattacgccacggcggagcaggtggcggaagaccccgtcaagaccgcgcaatcgtttgaggagcagggcgcgcgctgggtgcaccttgtcgatcttgatggcgcaaaggcacgccgccccgtaaacgacagcaccgttttctccattcgcgataatgtctcgatgaatatagaagtcggcggcggtatccgcgatatggacaccgtggaatattatctttcgcacggcatcaatcgcatcattctgggctctgcggcgctgcacagcccggagttcgtgcgcgaggccgtgaaaaaatacggcaaaaagatcgccgtcggcattgatgcgttaaagggcaaggtggcggcagagggctggacggctcaaagcgaagtggattacctcgaaatggcaaagcgcatggaagacatcggcgtgcgctacctcatcgtgaccgatatttataaagacggcaccatgaacggcccgaacctcgtcatgctcgataaggtcaaccgcgccgtcagctgcaacatcatcgcaagcggcggcgtcggcaacttaaaggacatcgtagacctcaacgccctcggcgtgtacggtgcgattgcgggcaaatccatttatacgaaagcgttggacttaacggcggccatcaccgccagtcagcgcctttccggcaaatcgttcaagtgcagcgaagaagaggaagaccatcttgagcgctacttcaagaaatcggagctcatcccgtgcatcgtgcaggaggcctccacaaacgaagtgctcatgctggcatacatgaaccgcgaatccatggcgaaaacgctggagacgggctacacgtggttttacagccgcagccgccaaacgctgtggaacaagggcgcaacgagcggccatacgcagaaggtcatcagtatgtatgccgactgcgacgacgatacactgctcgtaaaggtcgtgcagacaggcgcggcgtgccacaccggcagccacagctgcttctacaaagagattgcaagaaactgacggagggaacactatggacattttgcagcagctttatgataccgttttggagcgcaaggacgaaaagcaggagggctcctacacctgctatctcttcgagcaggggcttgataagatcctcaaaaagtgcggcgaagagtgcagcgaagtcatcatcgccgcgaaaaacggcaaaaaagaggacaccgtgggcgaaatcagcgaccttctctatcacctcaccgtcatgatggtgaacgagaacatcccgcttgacgatgtgcgcgcggagcttaaccgtcgtcacggcaaaacgggtaacctcaaaactttccacaaggtggaccacaatacatgacacaaactgaaaaacacgcactttggacgcaggaagagcaaagcgccgaaatgcacggctgggatttttcgcacatccgcgggcgtgtagaggaagccccgctgccgtgggattataagcaaaaggtgctcgattttttaaagccgcagtccgtcattttggatatgggtacgggcggcggagagttccttttgtccctgcgccacccgttttcgcagacaagcgtcacggaaagctggcagccgaattttgagctgtgcgaaaaaaagttagcgccgctcggcatcaccgtgcgcaaaaccgaagaggacaaacctctgccgtttgcggataacagctttgacctcgttttaaatcgtcacgattcttatgacgtaaacgaagtgcgccgcgtcctaaagcccggcggatatttcatcacgcagcaggtaggcggcagcaacaacttgcgcctgcgcgctttgctcggcaataacaaaaccgccatgccgagctttaacctcgaaaacgagctgctgcgcttcaaaaacgccggctttacggtgaatttctgcgaccaagcctatgtaaccgaccactatttggatgtcggcgcactcgtgtggtacgctaaggttctgccgtgggagttcggcaatttcacagtagaaagctgcttgccgcagctcgatgcgctcgacgcgctgtgtgaaaagcaaggctatatcccaagcgtgcagcaccgcttcatgctcattgtccgcaacagaaagccgaaagaataagggggaaaccatggcagccaacattcgctttgcaaccgaagcagacattccggtcattttagagtttattcatgcgctcgccgcgtatgaaaatatggaagatcaggtcattgtaacgccggagcttttaaaagagtgggtcttccaaaagaaaaaagcagaggtttttcttgtttcggaggacgaaaagcccgtgggctttgcgcttttcttccacaatttctccacgtggcttggccgcgcgggcatttatcttgaggatcttttcgtgctgccggaatatcgcggcaagggctacggcaagctgctgttaaagcgccttgcgcggctcactttgcagcgcggctgcggcagactggagtgggcgtgcctcgattggaacaccccaagccgcaagttctatgattccctcggcgccgtgcgcatggaggagtggacaacgtaccgcctgacgggcgatgcacttttgtcccttgcgtccaacatctcactcaaataatttcgcaaaagcaaagaggcgggctgcggctcgtctctttttgtcggttctgcggcttgcatttatgcaggaaaatgtggtatgatatttccgcaatttcacgaagaataggggaaaatgcagaatgaaaaaaattctgttcattgcgaccggcggaaccatcgcttcggcgaaaacggaaaacggcctcacgccggcgattacatcggaggaacttttaaatgccgtaccgcaggtgaaaaacctgtgcgcagtggataccgtgcagccgtacagcttagacagtaccaatatgtgttggaagcagtggatccacgtggcggagattatccgcgatagctatgcaaagtacgacggctttgtcatcgcccacggcacggatacgctgtcctacgcggcggccacgctctcgtatcttatccagaaaaacgaaaagcccgttgttttaacgggtgcgcagaaatccatcgaggtgccggacggcgacgcgcggcgcaatttgtttgaagcgtttgtatacgccacagatgcccgtgcgtgcggcacacacgtcgtttttaacgggcacgtcattgcaggcacccgcgccagaaaaacgcatacaaagagctttgacgccttttccagcattgatttcccggacatcggcgtgttctacgataaaaagctcctgtgctatattgatgagcgcccggagtgccccggcgcggtgttctacgataaattagtaccggagatcctctccatccgcgtcatcccgggcatggacccgtccgtgttcgattacatcaccgcgcactgccgcggcgttgtcatcgaaagctttggcgtcggcggcatcccgtactacggcgacaacgcgtttgaggaaaagattgctgcgttaatggaaaacggcgtacgcgtcgtcatcaccacgcaggttccgcacgagggcagcaacctttccgtctaccgcgtgggccatatcatcaaggaaaaataccgcgtgctcgaagcttccaacatgacaacggaagccgtcatcgccaaaatgatgtgggcgctggcctattccgagacccgcgaggaatttgaaaagcttttctgcacccccgtgggcaaagaccaattataactcgtcttgcggcgcgtggtattgctcctcgggcggtttcacagcgaatatatccttacaatacgacaaaaaggcagacttacgcagcctgcctttcgttatgtccgtcatgtttgttttttcgcggctaatttttcgcgcttcttatgcagcattgcaatgagctcgtcaatcatcgaagccgggtcatctgccgtgtcaatcatcgcagagaggaacggcgccacgagcgcgggatcctgaatcgttttgtcgcgcagctgtaactgggcatactcctcctctgtcatgcacggtgcaaaggtgcgcgcataattgcgaaacgttttcacaaagccggccggggtgatcatccctttttttaaaagagagttcaccatcaggtgaatgtagctgtccttccaggtcttctgtggggaaagcgcgaccatttccgccgcggaaagcgcacggtccgtgtgccacaaaagatacatgacttcgctttcgctttttgtaagcgccgtctttttcatataaatccgtaacctcgctttagtaggaatttgcgcagggttttatggaggtattatataatataacgctcgcgcttgtcaatgttttgggcaaaattcagttgaaaaattttcctatcagcatttttgcagattgccgaaaagcaaaaacaagaaaaaacctatgacaaagccgcaaagccgcgctgcgttttccatctaatcataaaagttgcaaagcaggggaaaagaagccccaaaaactcgtgcagcaccgctttaaaaggcaaataaacggctctaaacggatttttttgcaaagagaaacggatttcttctatttttcgggaaaaaagccttgacttttttgccccctgccactataattatttgtgttatttcgtgctaagtaacaaatacaaacccctgcctgatggcggatgggagggatatagatggctgaaatcagaatcaaagacaacgaatctttggagagcgcactcagacgctttaagaagcagtgcgcaagagcgggcgttattcaggaagttcgcaagagagaggcttacgaaaagccttccgttaagcgcaagaagaagtccgaagcagctcgcaagcgcaagtacaaataatcaaacgtgaagaagcgggctttttgcccgcttttttgtgtaaacgggtttttcccgagcaacacaggaggcaaagaccgaagctatggcggtatttaaaccgaccggcacgctccactgcgtgacggagcttacgcccgagcttttaaaagcgctcaatgtgcacatgatcgtgctcgatgtggataacaccatgtcgccgcacggctcgcagacgccgtttcccggcgtgcgggcgtgggcacaaagcgtaacggcaagcggcgtcaagctgatcgttgtttccaacaattacaaaaaacgtgtggcgccctttgccgcgcagttcaatctgccgttcgtttctttcgcgtgcaagccgtttccggtcggctacctgcgcgcaaagaaaatggccggcacgccccgcagggaatgccttgtcgtgggcgaccagatcttcaccgatatcctcggcgcaaacctttgcggaatgcggtcggttttacttgaccccctgtcgccggatccttccgccacggtgcgcttcaagcgcagtctggaaggctttttgcgcccgcactatacgcggctcacggccggggaagaaacggtaaaaagcaaagcataaagggcacctttgggtacacattagaaaggggaattatcaatgagcaatccgatcgaacgtcttaccaattctgtcatcggcggcgatagcaaaaaagcggcgctgatcgtttccgaaacgaacctctattacctcacggcgttcccgtccacagacggcgcactgctgctcacttccgagcaggcttattatctcctcgatttccgttacaccgaggccgcacgcgccaaggcgcaaaatgtggaggttgtggagttcacctcgcttaacgaaacctataagacgcttctgaaaaagcacggcatcaccgaggtgtacatggaatacgccgctctgccctacggtcatgcgaagcgttttgagcagctctccgaagagtgcggcgctaaggcgattttgaatacgaccttggacgatgccatccgcaagcagcgcatcgtcaagagcgatgaggaagtgaagagaatctgtgacgcacaggccatcacagacgctacgtttgagcacatcctcccctatatcaaggaaggcgtaacggagcgcgaaatcgcgctggagattgagttcttcatgcgcaaagcgggtgcagacggcaatgcgttcaaccccatcgttgtcaccggcgcaaacggctcgcagtgccacggcattccgggcaacacacagatcaaaaaaggcgatcttatcaccatggataccggcgctatgctcgcgggctatcattccgatatgacccgtaccgtcgcgctcggctatgtaaacgatgagcagagagccatctacaacacggttttaaaagcacagctcgccgttatcgacggcgcacacccaggcatgcgctgctgcgatgtggataagatcgcgcgcgacatcatcgagaccccgtacccgaacacgttcggtcacggcctcggccacggcgtaggcttcgagattcacgagtggccgcgcttcaataagaccgatgagaccatctgcgagccgggcatggtcatcaccgacgagccgggcatctacatcccgggcaagtgcggcgtgcgcattgaagacatgctgctcatcacagatgacggctgccgcagcctcacgcattccccgaaggagctcatcatcctgtaaaatttccgaaaaaacggagaaacagaacggttttttcttgaaaaaagccactttctgttatacaatagacctaagaaaaatttggaggtattatctatatggtaaccgcaggcgatttcagaaacggcgtcacctttgaaatggacggcaacgtttactcgatcattgaattccagcacgtcaagcccggtaagggcgcggcgttcgtccgcaccaagatccgcaacgtgatttccggtgccgtgacggaaaagacgttcaacccgaacgataagtatccgaccgctttcattgagagaaaggacatggagtatctctacaatgacggcgacctgtactatttcatggacagcgagacctatgagcagctgccgatcagcccgaatgtcctcggcgacaacttccgctttgtgaaggaaaacatggtttgcaaggtgctctcctacaagggcaacgttttcggcattgagccgccgaactttgttgagcttcaggtcacagagaccgagccgggcgtgaagggcgataccgctacgaacgtcacgaagcccgctacgctggagaccggcgcagagatcaaggttccgatcttcatcaacgaaggcgaaatgatccgcgtcgataccagaaccggcgagtacatggagcgcgcataagcgtttttccttgttccatacgccgaaacacccggggcgaaagccctacattaggcagcgcgtttgcctgccggaaagataggtgcaagcatgacaaattccgagaaagcggcatacatccgcggtttgatggaaggcatggatctggacccgaatgcgaaggagacgaagctcttcaacgcgatcgttgacctgctcgatgacctctccctttccgttgaggaaatggaagacgcatacgatgagctcagcggccaggtagacgagatcgacgaagacctcggcgagctggaagaagagttctacgacatcgacgaggacgatgacgatgacgatgacgacgcatgggaagacgaatgctattacgaagtcacctgcccgaagtgcggcgataccatcgagctcaacgaagaaatgctcgatgagggctccatcgattgcccgaactgcggcgaaacgctggagttcgacctcgaagaagacgattcctgcgattgcggcgaaaactgcgactgcaataaggaataattttcgggtcatataaacctgtaaagaacgggagagtcgttttgcggctctcctttttcttttcgcacgggtgaatttaggtcttgcaattatatgctgtttgtgctataattgctaagttccgatatatagtcgggccattagctcagttggttagagctaccggctcataaccggttggtccaaggttcgagtccctgatggcccaccagagcaatattaaacaaagccctcaagaaatcttctttcttgggggctttggcttttgcaaatctttgcaatgaaatgtaaatatgaacgcttaggcggtactgtctgtatggcagtgccgtctttttttattttaacatgatttcgagaatttcttcaaaagaaacagaagtaaatcttgcgttttgcgtaatacagaaatttttgcagcagacgtcgaagtttccatgataacgttcacttatatatttcttgaattttgaagacacgtttttagaagcgttataggcataacgtgaattctttattagttgattatattcttcacgtatttcacttggcaaaatcttggggcaaataataccgattttcttttgcccattttgagaagtgtttactttaatcgtatttcggataaaatctgcaaattcctgcggactgttatcggtttgtttgatctgaatacggccggtacgattgccaagcttttcaacagcggtaattacgaaaaagtgctcgcgcgtaatgacgatcggaatgacatcgatttctacgggcaagtttaacatctctgcgggtgctcttctgtattttctgatttgtgttcttacaagagctcttttaataaaatgtgtcattctttgggcggtgcggttactgcccaattttaatttgttttggagaaaacttgccgtgattattccgtttgatgcgtttatcaaatctatggcggcaaaccatttctctaacggcgtgtgtgaatcttgaaaaatcgtcccggcggtaacagacattttatatccgcatttcttacatttatatttgacctctttcgtttcccaagcttcagcacaaccgcagcgcggacacgtaaacccgtttttccatcgtatggaagccagatattctctgcattcgtaatcagatgtattcatgcttaaatttagttccataaacatccctttcttatttaatagaatactatacccgtttagttccgtcaagtgaatttaattgtgaatatcagttataggcagcacaaaacaaaaaatttttggagggttgtcaagatgactgacttcacaatttcaacgaaactcgcaagagaatttgcaatcgaatgctttgatgtactatcacgagaaatcgaaagtgcaaaaagaaagcagaaagacgaaacgaaggaggtgaaaaacacaagcagccgtgaaaacacctccaaaaactaaatcaaatgaaaggaagagtaaaaaatgaaaattcaagatttactattaaaatttcagggtgtaaagcaggtatctgaaaatcagtacatggcaatttgccctgcgcacgacgatcatagccccagcttgtctattggactttcaaaagacagaaaacagattttactcaactgctttgccgggtgcaaagcggaagatattctgaataacgtggggctaaaactaaaagatatgtatgacaatgatgaaaggaatgaaacaaatactatgagcaaaacggtctatacttattacaatgcggatggttctatcgcttataccaaaaatcgtttcgataaagcggatgggaaaaagagtttttcttttgtacgcccgaacggggaaaagggacttggcgataaaaagccggttccgtacaatttgccggaggtcattcgtgctcagaaggtctacttcgtcgaaggagaaaagtgtgcggacgcggttattcaggcaggaagagttgcaaccacgcttaactgcggttccgggtcaaaatggctttcggaatatcaggattacttcatgggtaaagaggtcgtcattcttccggataatgataaacccggaatgaaatacgcgaagaaaattgtggagaatattccgaatgcaaaaattgtttgtctgcccggcttgccgcctaaaggcgatgtatacgactggctgaaagcgggacactctatggaggaagtggatgatttgccttatttggatattttggaacaggatgaaagcacagaattgaaatcggaaccccaaaaaagaaaatcgggtaaaaataaaacacaagaaaatactttactggaaattctccaagagcaaggtgcaacactgtttatcaacagcgaaaataatgagccgtacattgcgcttagacaaaataagcatttgaaggttatgaaaatcgagagcggagaatttaacacgtatgcatcctatgtgtatcgtgaaaagacacaaagtggactaaaatcggagaacacgaaacaagtggctttatacttaaaaggcaaaacgctttttgaaaatagcaaaaaggtgaagctctataaccgagtcggaaaagcagagaatgccttttggtatgatttgagaacggaagattggaaatttgtaaaaattacagaagaagggtgggagatcagagaggaagataaaatactattcgatcgatataaccatcaaaaagagcagtgtttgccgcgcaaaaacggagatattcagaaaatcttgaaatacatcaacatcaagaaccagaaaaccctgtttttgtgttggtttgtcagctgctttgtaccagacatcgtacatagcgcaataatcgtttttggcgaaaagggcgctgcgaagacgacggcttgtacttttttgaagaaagccatcgacccgtcgatcgtaaaaactctatctttacataaagatatgccgtcaaagttaataggcttgcaggaacactggtttttgccgttcgataatctttctaaaatcaaccaagatacgagcgatttattttgcagagccataacgggtgaagcagttcaatccagaaaattgtatacggacgatgaaagccatttcttcttgttcaagagatgtctggctattaacggaatcaataatgtggcaaacagctctgatttattagatcgttccattcttttagagctgtctcgtgtcgatgaagaagataggcgagagctaacggaacttgaacaggaatttgaagaagacctgccggatattctcggcggagtgttcgacgtgctctcgaaagcgatgcgcatttacccagatgttcatttgagaaaattgcctcgaatggccgacttttgccgttgggggtatgcaatcggagaagccttaggcggtcagggggagaaattcctttcagagtacaatgcgaatcgcgaaaagagcaattatgagttgatcagttcggacagcgtagccaccttgatgatcgactttatggaaaacaaaagagaatggaagggcttagtttcagagttatggaactatttgcgtacggcagccgatgaaaccggcttaggaacaagggcggttccgccggcagccaatgcgttgtcacgcaagctcaatgaattacatagtaacctaaagaacgtcgggattaattttaccatcaaatcgactgcgaagggaagtctcattacgatagaaaacgaaaaaatatctcaattacctccatatattcaggaagataaagaagaccaagatgaggaagtggagttttaatggagatgtggagataatgacggtattatttccaaataaattctattaaggaatatattgtataacaaaagccattgaatccaaaatcggggttcaatggctttttctgtacagtaagctttcaggttagaggttagcgatgttataaacagagtcgccaatcgtaaattcggcgcatccatctgcattctcattgagagaaattccaagaccttgaagctcatagatttgcgaaagaaaagcggcaacatcttccggggtaaacgtacaacggttcacagacagatcatcagccgcagtaatcggtcttttgcgtatcttcatgcgaatatcctccttccgtttgttatctcaataatatataaggtgcggctattgagataaccggcttttataccggataaggcaagggagtatgcgtaggtaaaaagataggggagacatgagcacatttgatcttggcggtgtagcgccttgttctgaaagggttattctccttccacgcccagtaagatattaacagcctgctgtatttcaggctttgagcgatatgcccgaatgacctttcgttcatggtcggtcaattcatcagtggataaatgaacgtcaagcaggtcgcttggtgaaacattcaaagcgcggcaaatgtcggcaagaatatccgcgtcggggcggttgatgccttgttcccagttggatacacgacttttggttacatttattttactggctaattgctcttgcgttaagccgctttgcttgcgatataaacgtatcctgccgccaatttcatatttcacggaattcacctcattctatgaacattatacgcgaaaataaataaattgcaaggatgaaatcaagaaattctgtacttatacgctgacttcacagaaatactgtgatattataaatacaagtacagtaatactgtatttgcggaggcgtaaatatggaagtttacaaaaaagtgcgagcttacatagaaggaagcggctgcgggcaattcgcggtcgcacaaaaagcaggcataccccaagtggactttgatgccatgatgaatggagaaaaaaccatgtacgccgatgacctgcgcgcaatttgtctcgccctgaatgtaagtcctgaaatatttattgaagtggataaagagtagtgcacggggagaggaatatgaagaatattgaaagagcagcggaatttgttcttctcatggataaacagttgaaaaaccagctttttgtagttaatggagaagttcaagggaaaaagctttgggagaacacattcatcaaacatcaactggataaaagagatgcgggcgataaattctcggtcggcgaccatattcgtgcaatggtgtattcgttgttgtccttcggcgcacagtggagcagattagagccgtatatcgatataaataccggcgaaatatcggctattgacgatttattttgccaatatgatacagaaaaacttctcagttgtgatccagaagaaatttcagataaaattctatcttataaactcggttctccgtacaccaaaaaacaaatgaatgcactgataacggaaaatgtcagcaaacttctttcgcttgaacggcaatatggcagcattgatagcttctatatgaaaattttggttaaagatgaaacgcagaagacactcgtgaaagaactgtcgtcaccgaaaagcccacataagttcattcaattcggcgaagcgctcataacggagtatctgaaaaatgttggttatgatatagcaaagccggataggcatatccgtcgtattttaggcaggaatattttagattgttccgagcacgaaaatgcacctgcctatgaagcgatagacattgtggcggctattgcaaggcagttaaacagaccggcagcggaggtggattatattctctgggcatattgtgccaaaaactatggagaaatatgcacgaagaataatccgcactgtgacaggtgtgttgtaaaaataaaatgtaaaaaagcggaggtttgaaacaatgggaaacattatggaagaagctttcaccgcttatacaggcagtgaaaaagtctttactttaaatggtaaagagttggtgatcccggcaagatttgatgcctttattacatatcgcaccaaattcatgaaacttgccaaagcatgtgcggataaagcggccgaggagtataaagaaaaaatccatgacctcgacacattcagagctttattccaagacatttatctggaaaatttgaaaatcgtcagcagcaaagcggttgatattcttgtgtctgaaggtatttatcagttctccatcgatacttttagcgcaaagaatattgaaacctttcacacggccttgaatgatttgcgtacaacaaatgaaagtgttaaattaacggaacaaaacaatgccaaagttacgcagaatctcaaaaacggcatcggttcgctgtttagtaaccggggaagcttcgcacgggggcttgtacaaggcgcggtggaaagtacgcttgaaggttcggaaattacagcgccgcaaaaagcggaactttatcagcgaattcgcacacaccttctgctccacaatgtatttcaggattattggaacgcagtcattactttggtggggattttacgagaaaacggcaaggatatttggcttgccgacagtggtaagatcgatgacataaacgcagttcttgaaagtgttcataacccgaattttccgcaggaaaaagttgcggatgttctgtttgattgtattttgaaaaaaccgaatgcggctgcgatttataaaaccatagaagaaaagtttggcctaacagatgaagtacagaagatattcgattatttcatctacccggattttacaaagatcgtttataccgagagtgattttccgggaatggtaccggcaaactccaatatggcgcagggtcagaacgcttcggaagaacccaaaaagaaaaaagggttattctcgttcatggataaggaaagcggtgaaagtgtgaaaaagggcttaaaaatcggtgcaggtcttttagcgacaagtgtgcttttggctgcatctaaaggtggaagcaccaacaacaattccaacaataatgatggtaagaaagattattatttgagtagtggatgcaagagggcaagattaggcgcaagggatggttgtgtcggttgtactctggcaccttattgttcacattgtcgataatcgttttacttgtactctatggatataaccccaaacatctcttttcgtttataatcaaatagtctgataaacagccgtagtccttagggattacggttgttttttataaagtaaattgggttggcctttccgcttataaaattgctaaatattaacgaattattaacggatttgaatttggcaaaatactgtcttataataatatcagaccgaaagaaaagaggttcttgcaatgatttatggttatgcgcggtgctctacaaatgaaaagcttcaggatattaaccggcaggtcagagagcttaaacaacaaggcgcaacggatgaaacgatttatctggaatatgaaagcggcgcaaagacagatcgcgcggaactgaataagctgcttaaaaccgtaacggttggtgatacgatcattgcgacggaagtcagcagaattacacgcagtacaaaacagctttgtgagatcatcgagtttgcgaaagagaaaaaactgaaattggtgctcggcagctttgttgtagactgcagcaaagagcttgacccaatgacagaaggaatgcttaaaatgatgggcgttttcagcgagatagaacgaaatatcatcagccagcgcgtgaaaagcggaatggaaaatgccaaagcgaaaggtaaaacggtcggcagaccaagtgtaaaggcggacgacataccgagcgccttttacaggcattatccaaaatataaacaagggcagttgacaaagaaagatttgtcgcggctttgcgaattatcttatccaaccgtatacaagtatctcaaaatcatcgaggaggcaaatcatgaaggttagtatttattcgagagaagaaattgaaaagttgatcagcaaagggttcccggagaaaacagcggtcatcagcttttacgacccgccgaatattcgaaccggggagatttcggaaccggtcgattataaaggcttgccggaacgggtttttcaagtggaagttcatgatattgatatggaaacattggaagattttggtttgtcgtttgatacgtatttcccggaagcggatagtcttgcggcgtttatacaaaaggctcatgatgacggcttcgatataatctgccaatgtgaatacggtcaaagccgcagtgctgcttgtgcggcggcaataatagaatattacgagaaaaacggaatatccgtatttgccgattacagatattatccgaaccaactgatttttaacaaattgttggacgcactaaaaaacaaggaggtcaatatttgatgttagcggttatttatgcgaggtacagtgatagcaagcagagagaagaaagtatagagggacagctgaaagtttgccatgaatatgcgcaggcaaacggattctccgtaattcatgaatacgcggacagagctaaaacaggcagaaatgatgatcgataccagtttcaaaaaatgctgaaagatgcggagaagaagcagtttgacacggttattatctactcgtctgaccgtttcggaagacaggtacgccaagtattgaataatataaacaaattgaccgagttgggtgtctctgttcgctccgccacagaaaaatatgacgattctccgtatggcagctttgccaatctggtaaaaatttgtatagatcagttttattccgatgatttgacccaaaaggtaaaacgaggaatggacgtcaatgcggagaagtgcttatccaacggagggactacaccgttaggatatagaattcaaaatcataaatatgttcttgatccgcagaaggctcccatcgtgaaagaaatttatacgaaatatgcgggaggatggagcgcaaaacaaatctgcgacaatttgaacgaacggcatataaaaacggcaaagggagcacagttcaataaatcctctttgcacgtgctgctgaaaaaccggaaatacttgggcatttacaaatacaaagatattgaagtggcaggcgggatgccgagaattatcgatgatgcgttatttgaaaaagttcaggataaaatgaagctgaataaacaggctccggcgcgggcgagagcaaaggccgaatatcttctgaccactaagttatattgcgggtactgtaagtctatgatgatcggacatagctcaaaccaaatcagtacaaaaggggtgatttacaactactacaagtgtaaaaattcgggtgccagaaagccatgcaaaaagaaaatgattatgaaaaactacatagaggatgtggttgtggaagaatgcaaaaagttacttaccccgaagaatatcaataggatagcgaatgaggtcgtaaaaatctcagcacaaaatgacgatgtatccgagcagaaaaggttagaaggggaattaaaaaccgctgaacgggagaaagaaaaccaaatgacggctctccgccagtgttcgagtgatgaagtgcggaaaatgtttatcatagatttagaaaagctggcggcggaaatcaaagagcttgaacgccagattgaaatcgaaaaatcacgtcattacgttttaacgaaagaacaagttgtgcagagattaacagcactttcaaaaggcgatatcaaggacaatacatatcgacggacgttgataaaactatttgtcaataagatattcttatatgacgataaattcacgatcacgttcactaccggcgacgatgaagttgaaatcaccgatgcgctgttaagcaaaattgaaagcggaaaaaatagaaaagaagggacttctttttgtctatcaaatgttgtggcccaccaaaaaagagttttgtcttttgacaaaactcttttttcaatgtgcgggtcgagaatgacgagtaatttctgcggcccgcagtttgtgggcatgtggcgcgaaaagctgtggcacaaagaaatgaccgcaacaatccatagcgcaaaactgggcgaataacagcgaaacagagtgtaaaagcacgctttatctggggctaaacgcagatataagcgtgcttttgcgtagaaatgcccttgacaaattccgagcaacataatagacttaaaacgtctaatcgggatagaaaaggggcaagaacatgacactgaaagacctgccgatcggcaaaacggcaacggtgacaagcgttggcggcgagggcgcgctgcgccagcattttctggatatggggctcattccgaaggcggacgtcaccatggtgaaattcgcacctatgggcgaccccgttgaggtgcgcatacatggctacgagctgacgctgcgccttgccgatgcggaaaaaatagagatcgataaaattcgcgacacgataacggagccgatgcggccgcaggacgcgcgcccgatttttcacccgggtctcggcgagggcggcaagtaccacgtgcagaccggcgagccgttgccgcccggagaaacgctgacctttgcacttgcgggcaatcagaactgcggcaaaacgacgctgtttaatcagctgacgggctctaaccagcacgtgggcaactttccgggcgtgacggtggaccgcaaagacggtgcgatacgcggcgtggaaaacacgctcgtcaccgacctgccgggcatttactccatgtcgccatactcgagcgaggagctcgtcacgcggcgtttcgttttggatgagcatccgcgcggcatcatcaacattgtggacgcgacgaacatagaacgcaatttgtacctgacgatgcagctgatggagctggatgtgccgatggtgctggcgctcaatatgatggacgaggtgcgccaaaacggcggctctgtgcgcgtgaacgagatggaggagatgctcggcatccccgtggtgccgatctccgccgcgaaaaacgagggtattgaggagcttatcgaccacgccgtgcacgtggcaaagtaccgggaagcgccgggacggcaggacttctgcgatgtgaacgaccacaacggcgcggtacaccgctgtttgcacggcattatgagcctcattgaagaccatgcccacgatgcgggcatcccggtacgctttgcggcgagcaagctcgccgagggcgatcagcttgttttggaccggctgaacctcgaccagaacgaaaaggagacactggagcacatcatcacgcagatggaaaaggaacgcgggctcgaccgcgccgccgccattgccgacatgcgcttcagcttcattcaaaaagtgtgcggcgctgcggtcgtaaagccgaaggaaagccgcgagcacgcaagaagcgtggcgatagaccgcattttgaccggcaaatacacggcaataccggcgtttatcggcattatgggtcttgtattctggctgacgtttaacgtcatcggcgcgtttttatcgaatttactggacatgggcatcggcgcgctgacggatattgtcgaccgcggcatgacggctgcgaacgtgaaccctgtgctgcactcgcttgtcatcgatggtattttcaccggcgtcggcagcgttttgagctttctgccggtcattgtgacgctgtttttcttcctctctatgctggaggacagcggatacatggcgcgcgtggcgtttgtgatggataagttattgcgcaaaatcgggctttccggccgcagtgtggtgccgatgctcatcggcttcggctgcaccgttccgggcgtgatggcgagccgcacgctgccttccgagcgcgaccgtaaaatgacgattctgctcacgccgtttatgagttgctccgcaaagctgccgatttacagcttttttgcggcggcgtttttcccgggcaagggtgcacttgtgatggtcattttgtatttcaccggcattttggtcggtattttgatggctttgctcatgcgcggcacgatgtttaagggtgaggctgtaccgtttgtgatggagctgccgaactaccgcatgccgggcgcgaaaaacgtagcgcagcttttgtgggaaaaggcgaaggactttttacagcgcgcttttacggtcatttttgttgcgaccatcatcatttggtttctgcaaacgtttgacctgcgctttaacatcgtttccgattccaaagacagcattttggcggtcgtcgccgggtggattgcaccgatttttgcgccgctcggctttggcgactggcgtatctctacggcactcatcacgggctttatggcaaaggaaagcgtggtgtctaccttgacggtgctgttcggctcctccacggcgcttgcaacgctgctgacgccgctttccgccgcaagcctgcttgtgttctgcctgctgtacacgccgtgtgtggcggccattgcgtccgtaaagcgcgagcttggcggtaagtgggcggcaggcgtcgtcatcggtcagtgcgtcatcgcgtggctgatagcggggcttgtgtacggcatggggtcgctgtttatatgatggataagctgaacataggcacggctcttgtgttccttttgctcgtcatagcggtgtttttggctgtgcgggccattcaaaaaggaaagaccggcggctgcggcggggactgcacccactgcgccggctcttgcgcaaagccggaacagaaaaacaaagcataaaaagaacagaacataaaaaatctcctgcttcccgaaagaggcaggagatttcgttatcttaacttattcgtcttcttcggagacgccgtgctcgtgtgcttcgtcggcatccttgatctcgcccacgatgggggtggggtcgatgccgcggcggcggtagtaatcggagaccgcagccttaatggcctgctcggccagaacggagcagtgaaccttgatggccggaagaccgtccagcgcttccatgaccgccttgttcgtcagcttcagagcttccgggatcgtcttgccttttacaagatcggtcgccatactgcttgtcgcgatggccgcgccgcagccgaaggtcatgaactttacgtccgtgatgacgtcgttatcgaccttgatgtacatgcgcatgatgtcgccgcacttcgggttgccgacttcaccgacaccgtctgcatctttgatttcgccaacgttgtgcgggttggagaagtgttccattacttttgcactgtatgccatatcgtttcatttcctttcgtacattcgtaccggattattttaaaattaagagatcgtgcggccgtggatgatcgcatcccacagcggactcatggcgcgcagacggtcgatgatcttcgggagcacctcgatgatataatcggcgtcgctctcgtcgttcacgtcgctgaagctgagacgcagggaaccgtgggctacctcgtgcttaaggccgatggaaagcagcacatggctcgggtcgagagaaccgctggtgcaggcgctgccggaagaagcgcagacacccttaaggtcgagcatcagcagcatggattcgccctcaacgccttcgaaggagaagttcacgttgcccggcagacggtggtagcggtcgccgttcaaatgactgcggtcaatctttgaaagctccgtgatgagcttatcctgcatgcggcgcagctttgcgttcttttcgtccatcgtattgatggcgttctcgagcgcaacgctgaggccgacaatgcttgcaacgttttcggtgccggcgcggcggccgcgctcctgtgcaccgccatcgatgaggttcggcaggatgatgcccttcttgatatacagcacgccgacgcccttcgggccgtggaacttgtggccgctgagggacagcatgtcaatgttctgctcttttacgttgatcggcacattgccgacagcctgtacggcgtcggtatggaaccaaacaccatgctttttgcagatttcaccaatctccgggatgggctggatggtgccgatctcgttattggcatacatgatggtgacaaggccggtcttatcggtgatggcggcctcgagctcttccgggacgacgatgccgttttcatgcacgtcgaggtacgtgacctcaaagccctctttttcgagcgctgcgcaggtgtgcagcaccgcgtggtgctcaaacttgcttgtgatgatgtggttcttgccctttttcagcatcttgtgcgctgcgcccttaatggcccagttgtcgctttcgctgccgcagcttgtgaagtagatctcattcggctctgcaccgagacattttgctacttttgcacgtgcttcctcaagcggcttttttgcagccgtgccgagcgcatacaggcttgacgggttgccgtagcattcggtgtagtacggcagcatagcctcaagcaccgcaggggagacggcagtggtagcggcgttgtccgcatagatgatcttcttgccgttattttccatagctttatcagtacctttcggatagtgttttttgtgagggaacagaaaacgcatttggggtcgatcggtcgggatacgcatattctttcctcagcgagataaatatacaccaaattggtatacttttcaatagggaaattccagaaagtcaaaatttttctgaaaaagcaggaaataaagaccccgaacgagagttttccgtacaaaatggaagaaaacggcggctgttttttgaaaaccggcgtacagaacacaaaaaatcgggagaatatgggaatagaacctctgcggtgtgcccaaactccgtacagagcgaaacggcacgcggcttgacagcacggggagaatagcgtaaaatagaattatctttttgtgtgcgggtatttttcgcatgcgtgaacggctgacactttgcacgtaaacggtacgtgtaacggatagtgaaaaaaacgctgcggtgttttgatttacatgtgttgaacggaaaaaacagaagaaagaaaagcagaaggcggcgcggacttgcgtgcgttttattctgctcatgccgaaaggcgacactgcgcagagcatcggttggtgcttttgtataccttatttttgcgtgaattgcgacagtgcgcctgtgttatttgaaaggaaggtcaatttggcagaaaaaagaatcagaaaaatgacgaaattaacgtcgctcggcgacgcgcctgcaaagcagcaggaccagcccctcagcggtgcaggggaaagcttcatcggcaagatttccggccccatcgaaaagccggtgagacgccagaaaacgcgcagaacggaaaacgcgcaggtaaaagaagaagcggcacagcaaaccgtgagcgaaacaaaagaggcgaagccgaagcgcacgcgtaccgcgcaaaacacggacgcacacaaaaagacgacgaaaacggtaaaatcggccccaaacggtgaaaaagcacccgctaagacaacaaaaagcacgcagacgaaaaataacaagggcaggggcaggcgcacaaagcagaagccctctgtgcgcgcgtatttcctcggcggcttaaatgagatcggcaagaacttcacgctgtttgagtgcgaaaacgacatggttatcgtggactgcggccttgccttcccggacgaagaaatgcccggcatcgacgcggttattccggatttcacatttgttgagaagaacaaggaccgcatccgcggtattgtcatcacgcacggccatgaggaccacatcggttccctgccgtatttgctcaaaaagatcaatgtgccggtgtatggcacggcgctgacggtggcgctgattgcgaataagctcaaggagcacaacctcggctatgtgaagctgaacgtcacaacggcgggctcgcacattcagctcggctgcttcgacgtggagcttatccacgtaaaccactccatttccgacgctgtgggtcttgcgctgcacacccctgcgggcgttattgtccacacgggcgactttaagatcgatttcacccccacgcagggcggcatgatcgaccttgcgcgctttgcgcagctcggtcaggagggcgttttgctgctgatggcggactctacgaacgcagagcgccccggctacacacagacggagcaaaaggtgaacgcgacgtttgacgcactctttgcccgcgcggaagcgaataaaaagcgactcatcatcgcgacgtttgcgtcgaacatcagccgcgtgcagcagattatcaactgcgcggaaaagtacggaagaaaagtggcgctgtccggcagaagcatggtgaacgtcatgtccattgcgagcgagctcggttatctcaaagtgccggacggtctgctcatcgacctcaacatgatctcccgttacacgaaggagcagattgtgctcatcacgacgggcagtcagggagagccgatgtctgcacttacccgcatggcgtttgccgaccaccgtcaggtcgcggtcggtgaggacgacatgatcatcatttccgcgcgccccattccgggtaacgaaaagatggtcggcaccgttgtagacgagcttttgaagcgcggatgcgatgtggtgtacgaatccatgtacgaggtgcacgtttccggccacgcgtgtcaggaagagctgaagcttattcaggcgctgacgaagccgaagtacttcatcccggtgcacggcgagcagaagcacctgcgcaagcatgcgggcgtggccgtcagcatgggcatgccgccggaaaatattttcatcggcgatgtcggcagcgtggtggagattcatgaagactacatgaaacagctgcccgatgtacaggcgggcgcggttatggtggacggcctcggtgtgggcgacgtcggcagcattgtgctgcgcgacagaaagcaccttgcggaggacggtctcatcattgcggtgtgtacgattgaggcaggctccggcagagttgtttccggtccggatatcgtatcccgtggatttgtgtatgtgcgcgagagcgaggcgctgatggacgaggcgagacggcttgtcaacagcacgattgagcagtgcgcggacgaaaacgtgcgcgagtggagcgccattaagctgcgcgtgcgcgacaacctttccagactgttatataaccgcacaaagcgcagcccgatgatcctgccgatcatcatggaagtttaaattcagtttaagttagattagtttcttgggggttcccctcagaaggagagacgggaaatgaacaagcgacgcatctgggcgacctcgccggtctattatgttatggcagcggtcatgttcattatggcgtgcttcagctatacgcagaataagattctgtttgcggtggagatcacggtttccggcctgtgtttggcagcggttatcatgaccgacctgcattaccgcgtgcatgtgtacacggcgctcagagctgcgagaaaggtgctttccgccgatgaacagcgcaacctcgggcagtttgcgctgccccttgcggtgctgggctcggcgggcgacatcgtctggacgaacgagtgctttcaggatttattcaccgaaaacggcgaaggctgcggcgataacattgcggcgtacatttacccgaagactttgcgtcagattttatccgaaaacggaacctccgtttcctacggcgaccgcgagtttacggcctacggcctgcgcaccgaaagcggcagtgtgctttactttgtggacgacacgtattataagcagattcagcgcgactaccgcgaaaagcgcacggtcattgcggttatctcgtttgataaccgcgaggagctgacgcgcgatgcctccggcagtgaggattcccgcatcacgtccgaggtggaatccgtgctgcgcagctgggcgatcgacaccatggagggctttctgcgccgcatgacgaacgggcgttatatgctcatcacggacgaccagcacattgaagaagcgaaaacgaagcgctttgccgttttggacagcgtgcgcgccgtgaagggtgagaataacatgtctgccacgatttccatcggcatcggccgcgcgggcgtaacggcgacggaaagcgaactgcatgcccgtcaggcactggaaatggcgctcggccgcggcggcgaccaggtggccatctaccagcaggacggtacatacgagttcttcggcggcctctccaagggtgttgaaaagcgcgacaaggtgcgcacgcgcgttattgccgcgacgctttccgaccacattaaatcgagcgaccatattttcatcatggggcacacgaactccgaccttgacgccgtgggcgcggcggtcggcatgtgggcggctgtgacgaagggccttgaccgccgtgcaagcattgtgatcgacaagggccgctctatggcgacgacgcttatcaacgcatttgagcaccagccggagtatgaaaacatgttcatcaccccgcaggaggcgctcgaccgctgcacgcagcgttcgcttctcattgtggtggacacacattccacctcgtttgtggagagccaagaagttttaaaagccattccgcgcgtggtcgtcatcgaccaccaccgcatgatggtgacgcacattgaaaacgcgattatcttttaccatgagccgtacgccagctcggcttccgaaatggtggcggagctcgtgcagtatatcaacagctccgcgctcaataagaaagaagcgacggcgctgctttccggcattatgctggacaccaaaaacttcgttttgaagacgggcgtgcgcacatttgaagcttccgcctacttaaagcgccgcggcgccgacacggtggaagtgaagaagatgtttgcaaattcgctcgatacctataaagagcgctctcagcttgtggcaggtgcggaggtttataagggctgcgccattgcgtgctccaactgggaattcccgaatgtgcgcattgcggcggcgcaggcggcggacgagctgctgtccattcagggcgtgcgcgcgtcgttcgtcattttccgcgtgggcaatgagattgccatttcggcacgaagcctcggcgacgtgaacgtgcagattttgctggaggaattcggcggcggcggtcacctcaacatggcgggcgcgcagattaaaaacagcaccacgaacgatgtgcgcaaggcactcatccgcgtgctggacgaaaagctttccgaagcgacgaaaaagaataactaatgcggcaaagcggcgcgaagccgtttgactgctttagcgatagatttaaacgatagatttaaacgataggagatacgaccatgaaagttgtacttttagcagatgtaaaaggtgtaggcaaaaaaggcgagctcatcaatgcagcagaaggctacgcacgcaatttcctgctgccgcgcaagcttgcaaaggaagcgaacgcacaggtgatgaacgagctgaaaaacgccgaggcctccaaggcatataaagtgaaaaccgagaccgaagaagcgcagcgtattgcggaagctttgaaggacaagaccgtccgcatcaccgcaaaggcgggccagggaggcagactgttcggctccgtcaccgcaaaggagattgcgcaggagatcaaaaagcagtacggcttcgacatcgacaagcgcaagatccacctcgacaccgacatcaaggcgttcggcggctatcacattgaggtgaagctctataacggcatcaccgcgaagctggcggtatcggtgaccgaagcacagtaaaagcccgatgcacttgatgcgcaacattaaattttgcaatgactaaaagtcgtttacgattagaaaatcgttttcactttgaagtaatttcactcaaaaaagggtggtaaaaatgccggaagataattttcaactgaatacgccggcactgcccggaacggtgatgccgttcagcgcagaggccgagcaggcggtgctgggcgcggtgttgctggagcccgactgtctctcgaccgtggcggaaatgctgccgcgtgcggactatttttatcaggtcaataaccgcacgatttacagcgcgatgctcgatatgttcacggcaggccagccggtggacctcgtcacgctgctggagcacctgcgcgaagaggaaaacttcgatgagggcagcggaaaggtgtatctgatgcagcttgcgcagcttgtgccgagcgtctcgaatgtggagcgttactgcaccattgtgcgtgaccgttacgatttgcgtatgctcattcaggcggcgcgcggcattttggatgacgccatggaggacaccggcgaaacctcgctcctcttggattccgccgagcagcgcatttttgacatccgccagggcaaggcgttaaagggtcttgagcgcctgaacgaagtgctgtttgagacgtttgaacgccttgaccgcttgaactcgccggacaaagacctgtaccgcggcattcctacgggtatccgcgagctggataacacgatcacgggcctgaaccgctccgaccttgtcatcatcggcgcgcgacccggcatgggcaaaacgagctttgcgctgaacattgcacgccatgccgccatcacggcgggcaagcgcgtggcgtttttctcgctggaaatgagcaaggagcagctcgcttcccgtatcatttccacggaggcactcgtcggcggcacaaagctgcgcacgggcgacttgacggagggagaatggacgcgccttgtggaggcgggcgacattctctctaaggctgatttgtatctcgatgattccccgggcattacggtgccggagatgaaagcaaaagtgcgtcgtttaaaaaatgttgatcttgtcatcatcgactacttacagctgatgaacagtgcaaagcgcattgataaccgcgtgcaggaaatttccgagatcacgcgaagcctcaagatcatggcgaaagagctgaatatcccggttgtgacattggcgcagcttgcccgtgcgggtgaaaagcgacaggagcaccgcccggtactttctgaccttcgagattccggctccatcgagcaggatgccgacatcgtgctgttcctgtaccgagacgcatactacgcgaacgaatcggcttcgcccgaagacgtggacaaaaacagcgccgaggtcatcgtggcaaaaaaccgtcacggcgatctgcgcagcgtgccgctgcactggcagggtgagttcatgcgctttacatcgcaggaagttgtgcgtcatgaaaactgaggacattctcgcccgcgtgcggtatgatctgccggagacgggaaaaattgtcgtggggctttccggcggggcggattccgtgctgctgacgtatttgcttgcacaaaagtacggcgcggagcgtttgcttgcggtgcatgtgcaccatggtattcggggggcggaagccgaccgcgacgcggaatttgtgcaggactactgtaaagcacttgaacttcactgcaaggtgatttataaggatattcccgcgcttgcggccgtaagcggcgagggcgtggaggaatgcgcgcggcgcgtgcgctacgcgtgctttgcggaggaagcaagggaaagcgggtgcatcgccacggcgcacaacgccgacgataatgccgaaacgctgcttttgaacctgacgcgcggcatggggccgcacggtgcagggggcattccgccgcggcgcggcagaatttatcgcccgattttgaacatttcccgcgcagaggtggaacatctttgtaaagtatatcgacttgactatgtgacagattccacgaatttgacggtggactacacgcgcaataagctgcgccacagcgtgctgccggtgctgaagaatgtaaacccgcagatgacgcaggcgacgtctcgctttgcggagagcatgcggttgcagaatgaatttgtgttttcgtgcgcgaatgaattgctctgtaaagcgaaaacgccttacgggtatgacttgaaagctttgcggaccgcacacgaggcggtgctgcgcgcggcgctggaactgctgttatcgtcttacgggcggctctcttatgagcacatttgcagggcggcgggctgcgttttcatgggcggcagcctctctttgccgggggacatcgtgctggaggcgaagcaggacacgctcacggtgcgaaaaaaccgggagataaaagaccggaatgtgttttctgttccgctgagagcgggcgaaaacgtgcttccgaacgggaaaacgctgtttgtggagaaaaaaattcccgaaaaagaagaaatcaaccggaaagttcataatttgttattccaaaacttttcggattgtgataaaattacgaatgttccgagagtacggacgcggcgcgcgggcgatgttttcagacccgcagggcgcggcgtgacgaaatcggtcaaaaaaatcctgaatgaactgcgcattccggcggcggcgcgcgaccgtttgctgctgcttgaaaaagacggtgagatcatctggatcgaagcggtcggcgcggcggagggctatgcggcaaagccgaatttcccggcactggagcttacggtgacggacacggcaggcataacccgcatataaagcggaaagaattttgaggaaagggtcatccgaatggaaaacacaatgttaaacgatatcaaggaagttttgtacagcgaagcgtacatcgacagcatggtcaagcgcgtgggcgcggaaatttcccacgattacgccgataaaaacctgctgcttgtcagcgttttgaagggttctgtcgtctttatggcagaccttatgcgcgccattacgattccggcccgcatcgatttcatgtgcgtttcgagctacggctccggcacgaagacctccggcgttgtcaagatcatcaaggacctcgacatcaacctgaagggctatgatatcgtgattgttgaggatattctcgacagtggcaagacgctgcactaccttgtaaaccttttgaaaagccgcgagccgaacagcattgagatctgcacgctgttcgataagccggagcgccgcgaggtggaggtctacgcaaaatacaagggctgcgatattcccgatgcgttcatcgtgggctacggtctcgattttgatgagaagtacagaaacctgccgtttgtcggcgttttgaaacctgaagtctacggtgaagtctaagcttccgttttgataaaaaagtttctgtttctatttaaggatacactttgtatccaatttgatttccgggaggtcggaacttgaacagcaacaacaaaaaaatcattcgcaatcttttgatctacctcggcattccgattttgctcgtcgtgctgcttttgcttctgtttgaccgcggggcagaccagacggggctgaaatactccgatgtactgtcttactttgaagacggcaaggtgagcgcatactcgctgaacctgggcacgggcgagatgaagctgaccgtgacagaggacagcagcaaaaaggaatccgttgtgcgctacacggtgccgaacgtgaacctgttctacaacgacgtttcggactacatcaagtcgtataacgaggaacatccgaataaccgcatgacgcaggatgtcatccgcccggcggagacgagctggcttgtcagcctcattccgacgttactgatgatcgcgctgcttgtggcgttctgggtattcatgatgaagcgcatgggcggcggcggagccggaaaccagatgaatttcggcaaagcgaaagtcaagcaaataaacgacgaaaagcgccgcacgacgtttgcggacgtggcgggcgcggacgaagaaaaggaagagctgcgcgaaattgtggagttcttaaaacgtccgaataagtataacgagctcggtgcgcgcatcccgaagggcgtgctgctcgttggccctccgggcaccggtaaaacgcttttggcgcgcgccgttgcaggcgaggccggcgtgccgttcttctccatttcgggttccgacttcgtggagatgttcgtcggcgtcggtgcatcgcgtgtgcgtgatctgttcgacaaagccaagaaaaaccacccgtgcatcatcttcattgatgaaatcgatgccgtgggccgccagcgcggtgcgggtctcggcggcggccacgacgaacgtgagcagacgctgaaccagctgctcgttgagatggacggcttcggcgcgaacgagggtgtcatcatgattgcggcaacgaaccgcccggatattctggacccggctttgatgcgtcccggccgtttcgaccgccaggtgatggtgggctacccggatgtgcgcggcagagaggatattctgcgcgtacatgcaaagggcaagccgcttgcaccggatgttgacctttctaccattgcaaaatccaccgccggctttaccggtgcagaccttgagaacctcttaaacgaagcggcgctgcttgcggcccgcaaggaccacaagtccatcacgatggaggaaatcgaggaagcgacgatcaaggtcgttgtcggcaccgaaaagaagagccgcgtgatgacaaacaaagagaagaagctgaccgcgtaccacgaggcaggacacgccattgcgacgtacttctgcgattcgcaggacccggtgcaccagatttccatcatcccgcgcggcatggcaggcggctacacgatgcacctgccgacggaggataagtcctaccagagccgcaacgagatgcgcgaggagctcatcgtgctgctgggcggccgtgtggcggaagccttggtgcttgacgatatttccacgggcgcatcgaacgacattgagcgtgccacgaagatcgtccgcgcgatggtcacaaagtacggcatgagcgaccgtcttggtccgatcacgtacggtgcggacagcagcaatccgttcctcggcaaggagatgggtcatgtctcgaactattccgaggagaccgccgcggagattgacgaggagattaagtccatcatctgcgacgcgtacgataagacgaagaaggtgctctccgaacacattgacctgctgcaccgtttggcgggtgtgctgtttgagcgcgaaaagctggacgccgacgagttccttgacgtgatgaacggcaagctgctgccgagcgcacagactgccgctgcgggcatcatcccggcagaagcggcagcgccggaaacgacagagctgccgaccgaagcgcaaacggaaccggaagcgaacacgaacgaataaatttttaacgaaagggaatgtgctcatttgcattccctttacgtttgtttatgggcaatcccgtgcgggtgttattttgcccgcttgaggaaaggaacatggtgaatggctaaaaagcaaacctacggcaacgacagcatcaaaagtctgaagggcgcggaccgtgtacgtctgcgtccggcggtcatattcggctcagacggtctcgacggctgcgagcacgcgattttcgagatcctctcgaactccattgatgaggcgcgccagggctacggcaaggagatcaccgttacgcgctatgccgaccattccgttgaggtggaagaccacggccgcggcatcccggtggattacaacaagcgcgaagagcgctacaactgggagcttgtgttctgcgagatgtatgcgggcggcaagtataacaacaatgacggcggcaactacgattacgcgctgggcctgaatggtctcggtctatgcgctacgcagtatgcctccgaatacatggacgcggatattcgctacgacggcttccgctacacgctgcactttgagcacggtgagaacataggcggactcaataaggagccttacggcaagaaggtcacgggctcgcgcattcgctggaagccggatatcaaggtgtttacggacattgacgtgccggcggactattacacggatatcatcaagcggcaggccatcgtcaacgcgggcgtgaagtttattttaaaaaatgaagtttcgccgcgcaaattcgagacgacggaattctgctacgaaaacggcattttagatcatgtgcgcgagctggtgggcgaagatgcgctgacctccgtgcagttctggcagtccgaaaagcgcgtgcgcgaccgcgaagacctgccgctttacaatgtgaagatcaacgctgcggtggcattttccaaccgcgtgcatttgacggaatactaccacaactcgagctggctggaatacggcggcgcaccggacaaggccgtgcagaacgcgttcgtgtaccagatcgacgcgtatttgaagcagaacggcaagtataataaatccgaaagcaaaattaaatttcaggacgtggaggattgccttgttatcgtcatgtcctcgttctccacgatgacctcctatgagaaccagacaaagaaggccatcaacaacaagggtattcaggaagcgatggtggagatgctccgccataatctcgaaatttatttcatcgaaaaccccattgaggcggagaaaatcggcgcacaggtgcttatcaacaagcgctcccgcgaggacgccgaaaaaacgcgcctcaacttaaagggcaagctgacggccaaaatggatatcacggggcgcgtggcgaagtttgtggactgccgcagcaaggatgtttccgagcgtgagatttttatcgtggagggcgattccgctctcggtgcggtcaaacaggcgcgcgacccgaactatcaggccgtgatgccgatccgcggtaaaattctgaactgcctgaaagcggattacgacaagattttcaaaagtgagatcatcaccgatctcattaagatgctcggctgcggcgtgcaggtaaagtcgaaggcgaacaagtccattgcgtcgttcgacatcaacgcgctgcgctggagcaagatcatcctgtgcaccgatgccgacgtggacggcttccagatccgcacgctgctgttgacgatgctgtaccgtttgacgccgcagctcatcgaagagcacaaggtgttcattgcggaatcgccgctttatgaaattacggcgaaggacaagacgtattttgcgtataacgagcgcgaaaaggacgagtttttgacgcagcttgagggccagaagtttacgattcagcgctcgaaaggtctgggtgaaaacgacccggacatgatgaacctgacgacgatgaacccgaaaacgcgcaggttgattcaggtgaagcccggcgatgccgaaaggacggcgcagatgtttgatatcttgctgggcgataatcttacgggccgtaaggactacattgcgacccacggcagcgagtacctcgatgacctcgatatttcttaaagctctgacgaaaggaagcgtaaagcatggcaagaaaaaaacagccgaaaagagaaaatacgccgaagatgcagggctttattgcgggcgcgggtgaaattcaggcgcaggacatcaacgacacgctgcggcagaactacatgccgtatgcgatgagcgttattatgtcccgtgccatcccggagattgacggctttaagccctcgcacagaaagcttctctatacgatgtacaaaatgaacctgctcggctcggcgcgcacgaaaagcgcgaacatcgtcggtcagacgatgaagctgaacccgcatggcgacagtgcgatttacgacacgatggtgcgtctttcccgcggctacgaggcgcttttgcacccctatgtagactctaagggcaacttcggtaagttttattcccgtgacatggcgtgggcggcttcccgttacacggaagcgcgccttgaccccatctgccgcgagctgttccgcgatatcgacaaggacaccgtggattttgtcgacaattacgacagtacgatgaaagagccaacgctgctgccggcggcattcccctcggtgctcgtcaacgcaaacacgggcattgcggtcggcatggcgtcgtccatttgcccgtttaatctcgccgaagtgtgcaccacggcggcggagctcatccgtgacccgaagcatgacatttttacgacgatgcaggcgccggacttcccgggcggcgggcagattattttcgaccgcgcggcgatggagcagatctacaaaacaggccgcggcagcatcaaggtgcgctcgcgctacacgtatgataaatctgcaaactgcatcgatattacccagattccgccgacgacgaccattgaagccattgtggaaaaggtcatcgaccttgtgaagcagggcaaggtgaaggaaatcaccgacattcgagacgagacgggtctggacggactcaagatcacgatcgacttgaagcgcggcgcagaccccgataagctgatgcagcggttgttccgcatgacgacgctggaggacagcttctcctgcaattttaacgtgctcatcgcgggcgttccgcgtgtgctgggtgtgcgtgagctctttgaggagtggacggcgttcagaatggaatgcgtccgccgcagaacgcactacgacctcacgaagaagaaagagaagctgcatttgctctacggcctcaaggcaatcttactcgacatcgacaaagccgtgcgcattgtgcgtgagaccgaggaagaaagcgaagttgtgccgaacctcatgatcggctttggcatcgacgaaattcaggccgaatatgtagcggaaatccgtttgcgccatttaaaccgcgagttcatcttaaagcgcaccgaagaggtgaacagcttagaggaagaaattcgtgaccttgaggcaattctggcctcaaaaacgcgcattaagacgattattgtgcgcgagctgaatgaaatcgcgcagaagtacggccagccgcgccgcagccatattttgtacgcggaggaaattgccgaagaagagcccgtggagactgtgccggattacccggtgaacctgtttttcacgaaagaaggctactttaagaagatcaccccgctttccctgcgcatgggcggcgaccaaaagctgaaagagggcgacgagatcgcccaacagatggaatcgacaaacgcggcagagcttttgttcttctccgacaaagcgcaggtctataagctgaaagcggcggattttgccgacaccaaagcgagcgtgatgggcgaatacgtgcctgcgcgcgtgcagatggacgagggcgaaagcgctgcgtacatggctgtaacgaccgactttaagggctatatgctgtttgttttcgataacggcaaggtcgccaaggtggagctttccgcgtactacacgaagacgaaccgcagaaagctcattaacgcgtattccgacaaggccccgcttgcggcggcgctgcaaattttggaagactgcgatgtgctgctgacgtcctcaagcggcagacgactgctcatgaacacggcgctcatcgccccgaagacgacaaagagcacgcagggcgtggcggtgatgaacctgaaaaaaggccaatgcattacggacgcgcatatctatcaagaagacgagctgcagaacccgtcgcggtacagaaagaagatcccggcgctcggcgcactgccgaacggagaggagggcggcgagcagatttcgctgtaaaaaatcagccctccggcaagaccgtttggcgttccgtttgtgcaggcgtgtggcctgcgcggcggagcgttcagtcctactgaagggcgggcagcatacagtccgcaccatggactgcgccgcccgcccgggaaagaccccgttcgtgtgacgcgaaagtgcggttttgccgcacggtccgttttggcgcgcacaaacgcctgactgtgactgccttggtatcagtatggacgtaggacgacggaatatgcaggaaaaaagcaaaaaattctgttgcaaaatcccgctttgtatggtatcataattaagctacgaataaaattagcgttaagtctcttgaagaggaggtaaaatatatgggtgctgttgaaattattttcggtatcgttctgcttcttttcgcactggcgatcatcattgtcgtactgctgcaggaaggccatcagcagagcctcggcgcgattaccggcggcgcggatacgttcctttccaagaataaggcgcgttccatggatgcgttccttgctcgttggacaaagttcattgcgattggcttctttgtgctggtccttgtgatcaacatcattatgtatttcacaaagtaagtaaatacttgcggaaatgcgcctcgcttttcgatgggtctccattcggaatgcggggcttttgtttttataaatcagactttaggagggaatatcatgtttgaagagattgaacgcctcacccgcgcgctgtgcgcagagcacggcacatccggctgtgagggcgacgtgttcaaagtggcgaaaaaggagctcggcttctgcaaagaggtgtgtgagaacgagcttggcggcgttgtgggcattttcggcgatttgagttctaagcgccgcattttgctggacgcgcacattgaccagatcggtatgatcgtgacggacattgacgaaaacggctttctgcatgtgacgaatgtgggcggtgtggaccgccgcacgctgccgggcagccccgttaccgtgttcggcacggagaccgtcacgggcatcggctgcacgctgccgccgcaccttgcaaagggcgatgataagataaagcccgttgcggagcagtgcattgacttagggcttccgaaagaggaagtggagaagctcgtcgctgtcggcgaccgcgccgcactgacgcgcccgctgaaaaagctcatgggcaaccgcatcacgggcacggcgctcgacgaccgtgcgggctgcgcgtgcgtcatccgcgccgcacagcttgcaaatgaacagaaccccgattgctgcgttatggtgctgtgctccacaaaggaggaggtcggcgggcagggcgcgcaggtctctgcgtatgcacttgagcccaccgaggccattgccgtggacgtttcgttcgcaaagcagccggacgcggagagcatgcttaccgcagagctcggcaaagggccgatgatcggcttctccgcggcgctggacagaaaaatcagcaaaaagcttgtcgagctcgcaaagcgcgaaaatatcccgtatcagctggaagctatgggcggcagaacgggtacgaactgcgacgagatcagtaccacccgcggcggcgtgcgcacggggctcatctccgtgccgcagcgcaacatgcacaccccggcggagatctgcgattttgaggatatggagaacattgcaaagctcatcgcggcgtatatcacggataaggaggcgcagccgaatgcttaactatgaaattctgaaaaagcttacccgcaccatcggtgtttccggcgaggaagacgatgtgcgcagcgtgatcttaagtgaaattgagccgtatgcggacgagattcacatttcgccgctcggcaacattctggcgtttaaaaagggcgaaaagcgtcccgagaagaagctgatgctctgcgctcacatggacgaagtgggctttgtcatcacgaacataatggaaaacggccttttgaagttcacgacggtcggcaatatccgcccggaggtgctctccggccgcgatgtgctggtggacggcaaaacgccgggtgtcatctgcgcaaagccggtgcatttgcttaagggcgacgaatttgaaaagcccgtgcccgtgaacgaactcgccatcgacatcggcgcagatacacgtgagcaagccgagacattggtgcagattggcgacaacgcgtgctttgtgccgttctttgagcacgtgcacggtacggtgaaggcgaaggcgctcgatgaccgcgtgggctgctttgcgcttatcacgctgatgcagcgcccgctcgaatacgacacgtatttcgtcttctccacgcaggaggagattggcctgcgcggcgcgggcacggcggcgtatattctggagcccgatgcggcgcttgtgctggagggcacgacggcgggcgatattcccggtgtgagcccgacggacgcagcgtgcaaaatgggcggcggcgcagtcatttcccttacggatatgcgtaccgtttacccgaaggattatttccgccgcgcgatggcgctcggtaaagaaaacaatattccggtgcagccgaagaccgtgcgtgccggcggcacagacgcgggcaccattcacgtttcccgcggcggcgtgaagacgctgacgatctcgcacccgtgccgctatatccacagcgcgatcgcgatgacgaccgaaaaggacatagaggcggtcattgacctgatggtgctgatgatggcggaaatttccggcggcaagctgtaatgatccgtcttgcggaaaatttagaagcgctctctatgtcgtgcggaagttctccgtttggctgccaaatccggtctaaagcgcaggcgtatggcttccatcagtcgttcgcgcagttttggacggacggggaagccgcctacggaaaaacggacggctccgtctgcattgcgggggagatcaccgacgcggacgaggcgcgtgcgtttttgagtgcggtgggcacaaatgaagtcgtgtgcagcgcggagaatgccgaaaagctggggctaaacatcaccgaaagcggcgcgattttgcaaaaagtgctgcgaaatgggactgtgcagcctgcggaggaaatttctccgagagagatttatgctgtgctgaaagcaaacggcatggtgggggagttcgagccgttttacctcgatttatcccaccgcatgcggcacggcacggtgcgctgcgcgggtgtttcggcaaatgggaagaccgtcgccgtggctgcagcagtgctcggcgaaagcgcgagcctcatttctgctgtggcggtgctgccgaaatttcaccgcagggggcttggcacggcggttgtccgaaaaatagagcgaatgctgccgagcggcacggtgtatatcctgcgcgaagaacgcaaaaacgaggcgttttatgacgctttgggctataaaccgtgcggcgcatgggcgcagggaaaattatgcaattaaaataattcagataaaggaaggcttttgcgtttgcgaaagcgggtttactatgtacgagttttttaaaattgatgaccgcgtgctgaaggcggcggaggaagcggagcagaaggctgcgccgtaccttgcgaaaatttccgaaacacagcggtataatcaggagaagatgcaggctgcgttcatgcaggcaggtgtcagcgagagccactttgtggcaacgacaggctacggctatggcgaccgcggccgcgacgtgctggacgaagtgtacgcgcgtgccctcggtgcggaggacgcgctgtgccgctataattttgtcagcggcacgcatacgcttaccgtagcgctttttggcgttctgcgcccgggcgatacgatgctgagcgttaccggcatgccgtatgatacgctgcgcggcgtgatcggcattacgggcgacggcaacggctcattaaaggagtttggcataaactacgagcagcttgacctgctgccggacggcacgcctgactatgacggcatggagacggccatcacgccgaagcaccgcatggtgtacattcagcgctcccgcgggtacagcctgcgcccgtccctgacggtggaggagatcgagcgcattgtaaagatcgcaaagcgccgtgcgccggactgcattgtcatggtggataactgctacggcgagtatgtgcagaaaatggagccgacggctgtgggcgcagaccttatggcgggttcgctcatcaaaaatccgggcggcggcattgcgccgacgggcggctacattgcgggccgccgcgaccttattgaaagctgcgcgtatcgcctgacgaccccgggtacgggtcgcgagatcggctgcacgctcggcaacaaccgcgagcttttcatgggcacgttccacgcgccgaacgtcacgggcgaagccttaaagaccgctgtgttcacggcggcgctgtttgagggcttcggctttgacgtgactccgcgctacgatgagccgcgcgcggatattattcaggcggtgcagctgcgcgagcgcgaggcgctgtgcgcatttatccgcggcattcagcagggcgcgccggtcgattccttcgttgtgccggagccgagccccatgccgggctacgactgcgacgtcatcatggcgtccggctcgttcacgtttggctcgtccattgagctttctgcggacgcaccgctgcgtgagccgtttgcggcatggatgcagggcggtgtgaacttcaacagcggccgcctcggtgcgattttggcggcacagtccatgctgaacgcgggctttttgaatctctaaattataaattttcggcggcaggcttcggtttgccgctttttttgttgtcgatttatccggaagataaaacttttatctttctttttgaataaaaccgtgctatactttttttaacaactttttaggggtgttaccatgagagacagaaaaaaggcgcaggctttggcgcacgagcttgtttccaaaatgacgatagaggaacgcgcttcacagctgaaatttgatgcgccgcccgttgaacggctgggcgttccggcgtacaactggtggaacgaagcgctgcacggcgtggcgcgcgccggcacggcgacgatgtttccgcagcccgttgccatggcgagcatgtttgacccggagatgatccgaaaaatcggcgatgtcgttgcgacggaggcccgcgcgaagtataacgaagcttctaagcacggcgaccgcgatatttataagggcctcacgttctggtcgccgaatatcaacctgttccgcgacccgcgctggggcagagggcaggaaacgtacagcgaagacccgtacctcacggcgcagctcggcgtggcgtacatcaagggtttgcagggtgacgggaaatatttgaaggtcgcggcgtgcgcgaagcactacgctgtgcacagcggcccggaggccattcgccacgaatttgacgccgaggtgagccggaaggatttgtgggagacgtatctgcccgcgtttgaagccgctgtgaaagagggcgaagtggaggccgtgatgggcgcatacaaccgcacgctcggcgagccgtgctgcggcagtgacctgctcatccgcaaaattctgcgcggcaagtggggctttcagggacactttgtctccgactgctgggcgatttccgattttcacctgcaccaccacatcacgaccaccgcgccggaatccgctgcgcttgccattaagatgggctgtgacgtaaactgcggcaacacatatctgcatttgctgcgcgcgctcgaggacgggctcatcaccgaggacgacatcacgacggcggcggagcggctctttaccacgcgttttatgctcggcgagtttgacgagaactgcgaatacaactccattccctatgaggtcgtagagtgcccggagcatttggcgctcagcgaggaagccgcgcgcagaagcgttgtgctgctgaaaaacgacggcattttgccgcttgataaaacgaaaatcaagacgatcggcgtcatcggcccgaatgcgaacgaccgcatggcgctcatcggcaactaccacggcacggcgtcaagatatatcacggtgttggagggcattcaggactatgtaggcgacgacgtgcgcgtgctgtacgccgagggttgccacctctacaaagaccgcgtggaggggctgggcctgcccggcgaccgcctttccgaagccgagaccgtggcggagcacagcgacgttgtggtgctggtgacgggcctcaatgaaaatcttgagggcgaggagatggaccagagcaattctgtcggctccggcgacaaggcgaatttactgctgcccgcgccgcagagaaagctgatggaggttgtcgcgaagaccggcaagcccgtcattctcatcaatatgaccggcagcgccatggatttgcgctttgcgcaggaaagcttctccgccgtagtgcagggctggtatccgggtgcacgcggcggcaaggcgattgcggagcttttgttcggcaagtattccttcagcggcaagctgcccgtgacgttttataacgactccgacgagctgcccgcgtttacggattacgcgatggaaaaccgcacgtaccgctactttacgggcggcgtgctgtatccgttcggctatggcctcacttacggtaaaacggaagtgacgaaagccgaaatgcgtgatgacggcgagcactatacgattacggcgacggtcaaaaatgagggctgtgccgtgcatgagattttgcaggtctatgtgcgtgacaatgaatcagaattcgcggtgcgcaaccacagcctttgtgcgtttaaggcggtttcactcggtgcaaatgagacgtgtgacgtagagatcaccgtgccgaaggccgcgcttgaaattgtggacgacaccggcacgcgccgcgtagacagccgcagcttcacgttcttcgtcggcacctcgcagccggatgaccgcagtgcggagctgcttggtacccgcccggttgcggtagaactcaagctgtaataaagtaaatgcaaacgaccctttcgcggcaattgcccaccgaaggggtcgttttgtctgtgattttttaaggctttccatttacaaaatttaccgaaagttgtatactgatactgctattttttaattcggaaaggcaaaagtatggctgcggatataaagaaaaacgatgatttttcaaagggaccgatttctaaaacggtcctgcgccttgcggtgccgatggtgctggcgcagtttgtgaacgtcttatataatatcgtagaccgcatgtatatcgggcatatttccgatacatcggtggatgcgctgacgggcgtcggcgtgacgtttccgattttactgatggtgacggcgtttgcgaatttattcggcacgggcggtacgccgttgttttctatggcgcgcggtgcggcacagcagggcggcgaagagggcgaaaagcagcgtgagcgcgccgcagacgtgatgaacaacacgttctcgatgctcgtcattacgggcgtaattttgtgcatggtggtgctgctcatcaaaaagccggtgctgtatctcttcggcgcgagcgacgcgacgtacccttatgcggacagctatctttcggtttacatgctcggcagcgtattcatgatggtctcgcttggcatgaacgggttcatcaatgcgcaaggctttgcgaaccgcggcatgctgacggtcgttatcggcgcagtggtgaacattgcgcttgacccgctgcttatttttgtgttcgacatgggtgtgcagggcgcggcgcttgcaacggtgctttcgcagctcgtttccgccgtgtgggtggtgcgcttcctgctcggtaagcgtacgctgtttcgtttggagttaaagcgcatgcgcccgcaggcaaagctcatcggcaagatcacctcgcttggcatttcgggctttatcatgggctttacgtcgagcgctgtgcaggtggcgtgcaacgcgatgctttcgcaacacggaggcgacctgttcgtcgcggtcatgacggtcatcaactccattcgcgaagtgacatatacgccggtaaacggtgtgacatctgccgcggcgccggtggtcagcttcaattacggcgcacagaaatataagcgcgtgcgcggcgtgattgtgttcacgacggtcgtttcatttagctatatggtgcttgtatggctcgtgctaaggctgttcccacacgtgtttattcagctttttaacggcgacccgcagttactcgaaacatgcacgcacgccatgcacatttatttcttcgggtgctttatgatggcgctgcaaatgtcggcgcagtatgttgtgcaggcgatgggtcgcgcaaagcaggcgattttcttttcactgctccgcaaggtcatcatcgtcattccgttgacgtttttgctgccgcagatccccgctgtcggtgtggacggtgtgttctgggcggaggttatctcgaactttgtgggcggcggcgcgtgctacattacgatgctgtgcaccgtctggcgcgaattaaaacacaaagaaatgggcgagcttgcacaggcgaaaaagtaaaagaacggagccgcgcatgggtgataaacctgtgcggctccgttctttttatgcggtttattctgcggtgtcgggcgagggggcggtgctttctgtgccgcttgcatcgctttcggaagcggtcggctctgcggcggggtaatcgaactcgcccagcacatcgccggtcgtttcgtcttttacggtgaagtgcaccgcgaagctttctgcgtcctcgcccgtaaacgctgcgtagagcagcgcgggaatgtacacggcctgcgcagcggcgttgtcgcgctccggtttatacaggtctttggtgctcagaatttcggcgctgcggccgtcttcggaaagcgtgacgctttttataaacggccacgtgccgtcctccggcaaagcgatgatctgctcgtgcagactttccttcagcgcggtgcagacggcatcgcgctcgtcttttgtcatttctatcgtgcaggagccgtcatcatttgtggtgacgtttgtaagccccagccggtgcgccgcggcggtgatgtcgagccctgtgcggcgcagggtgtccttggagatctgcacggtgtaatcccgctgcggttcggaagacgcggcggcaggcgcttcgcttgccgtttcggtctgcccgccgcacgatgccgaggaaaagatgagcgccgccgcgagcagaagcgccgccaaaagccgttttgcgtttctcattttgaacacctctttatgagcttatcttaaactatatcataccgtattcggcgaaaaaagtcaaaagaatcaaaaagctgttcgaaatcggaactttttcacaaaaatatgtggaaacagaagaaaaaacatggtatactgaaaccgatcatgcagggaatggagggatccgattgaccggtgcgattttaggagacattgccggctcgcggtttgagttcagcaaaccgagcgggttcaactataaaaaggtggagctttttgggaacaactgctttttcacggacgatacggtgctgaccatcgcgacgaaatacgcgcttttaaatgacatcagctatgcaaaggcttatggcaaattcgggcgtatgtacagagacgtggggtacggcacgatgtttcagcgctggctggacggacatgccgaaacgggctatggcagcttcggcaacggcgcggccatgcgcgtcagctacatcgcttaccactttgatacgctggaaaaggtggaggaagaagcgaaaaacagcgccatgtgcacacacaaccacatagagggcctgaaagccgctgttgcgaccgcggggctcatttaccttgcgctgcacggcgagcgcaaaaaggacctgaaaaaatactttaacaaagagtttgaataccccgtgcataagccgctgtgggcgtaccggccgaaggcgaagtttgatgctacggcggaggggaccatgccgcttgcgttccgctgctttatggaaagcgaggattgggaaagctgcatccgcaatgtgttcagcgtgaagtgcgacaccgacaccgtggcgtgcattgcgggcggcattgcgggcgcatactataagcggacggtggaaaacgaaaaggatcttttaaaacgctaccttatcaagcccgataagcgcaaggtcggcgagtttgaccgctttttatacgattgggctacaaagtaacatttccgcatatatttgaatttcggtattgaaaaaccgcctgtgtttttttgaaacgggcggagcgacgcagggatcgccgcgatttttaagggaaagggtttatcagaacatgattattgacacatatcagtccggcgccgtgatgcgtattttgcaaagcggcaagatttaccgcgcaagccccagtatttcgtttaagaaggagtacgccgcgctcatcgatatgctcgacctgcactgcgaatgccccatattcggcgtggtgcgcggcagaaagcagaataccggcggacgcgtttcgggtgcggtgcgcatccgtctcaatgtcccgcgcgaatacgtgaagctgaccgagtacaccgactgggcggattttctcgacaacttcaaatacacgaacccgaacgattattccaccatcatcgtcggcagcttggatgtgaaatcttcggaccatctccgtgtggtggagagccttaagcaccagcggcatctgttccagtacaaaatgccgcaggcgattttggagtatattgacccgaaatgggtggtacggtataaagtcatcacaaacacaagagagcaggaggaccgcaaggagcaccggctcaatttcttccgttggtaaggagggcttgaacttgaaaatcggtcaatacattttatcgcttgaccagggcacgaccagttcgcgcgccgtgttgtttgacgctttgggcggcattgcgggcatgggacagcgcgaatttacgcagatttacccgcagcccggctatgtggagcacgatgccgtggagatcttgcagacgcagctttacgccatgcggcaggcggtgcatgaggcggagatcaccgcggaggacatcgctgccatcagcatcacgaatcaaagagagaccaccgtggcgtgggacagcgagacgggtatcccgatctgcaacgccattgtgtggcagtgccgccgcaccgcgccggaatgcgagcggttaacagccgagggacttgaggagtacattcataaaacgacgggactcatcatcgacccgtatttttccggcaccaaaatgaagtggattttggataacgtgccgaaggccaaagtgctcgcgaaggagcatcgcctacgcttcggtaccattgatacgtggctcatttattcgctcacagagggcgaaagctatgtgacggacgtgacgaacgcttcgcgcaccatgctgtttgacattcaaaagcttgattgggacgagaaaatgctgaacgtgttcggtatcccgcgtgacgcgctgccgaaagtcgtggactcctccggcattgtgggcatgtgctccgaaacgatactcggcaggaaaattccgattgcgggcattgcgggcgaccagcacgccgcgctgttcggacagtgctgctttgataagggcatggcgaaaaatacatacggcacgggctgctttgtgctgatgaacacgggtgataagccggttttctccgaccgggggcttattacgacgatcggttggtgcgtgaatggcgagacgacctatgcgcttgagggcagtgcgtttaacgcgggctcggccatcaaatggctgcgcgatgagttgaagcttatcgcgaacccgcaggaagcggaccttcttgcggagaccgtggaggacgcaggcggcgcggtgtttgtgccggcgtttacagggcttggtgcaccgtactgggatatgtatgcgcggggcgcactgctcggcgtgacgcgcggtacgtctaaggcgcacatctgccgcgctgtgctggaaagcattgcgtatgaaagctatgacctcgtgaaagctatggaagcgggcagcggcacggaaatttccgagctgcgcgtggacggcggcgcatcgagaagccgttttttgatgcagtatcaggcagatttattgcactgcgccgtgagacagccgaagtgtctggaaaccaccgcgctcggctctgccatgctggcggggttggccgtcggtgtgtgggaatcgctggatgagcttagaaccgtgtggaagcttaaaaatgcgtatgacccgcaaacggcagcaggcagcgaagcaaaagcgctgaaacgctggcataaggccgtggaaagatccatgggctgggcggacggtttggattaagccaaagttaagcacagcgaagcgacgtaaaagttttcgccagcctttttcaaaaggctgtggaatccaagggtgaaacccttggtcgagctccgcagagctcgaaatccttttgcctgccataaaatcaggacaggagagggaacagtccagtggactgttccctcgtgggagacccaattagggggtctcccaaaaggcgtccacaaagacgcctttaaaataccaaacaagctagcatagaagcacgcagaccagtttttctgcgtgctttctttttgcctaaaatcaaagaaagtcgttttgattgagggaagcgaaaaatcctgttgacggataaaacaatatgtgatactatattatcacgctaaatcaaagtaatagggaggcgacgggatgatcgcaattatagattacggcgcgggcaatatccgcagcgtggaaaaagcgcttatgcatatcggctgtgaggtcgaagtcacacaggacccgagcattctcatgaaagccgacggcgccgtgctgccgggcgtcggttcatttggcgacgccatgcacgagctgcgcgggagagaactggaagcgccgattaaagcgttcgtcgcctccggcaagccgtttttgggtatttgtttagggctgcaaatcctgtttgagagcagcgaggagtccccgggcgtctccggcctgtcgcttttaaaaggtaaggtgttgcgtattcctgctgcgccggggctgaaaattccgcatatcgggtggaattcgcttgaaatcaaaaaggacggcgggttgttccgaagcattacgggcgagccgtatgtgtactttgtgcactcgtattatttaaaggccgaagaggacgttgtgaccgctacggcgcagtacggtgtggaaattcatgcggcggtgcagaaaaataacctcatggcatgtcaatttcacccggaaaaaagcggagcgttgggactgaagctgctcgaaaacttcgccgccatgacgcagggaaaggggggcgtgtaatgtacgccaaacgcattatcccgtgccttgaccttaaaaacggcagggttgttaagggcacaaatttcgtgaatttgcgcgatgcgggcgaccctgtggaggctgccgtcgaatacgaccggcagggcgcggacgagcttgttttgctcgacatcaccgcgtcctccgatgcgcgcggtatcatgctggatatcgtttcccgcgtggcgaacagcatatttatcccgtttacggtgggcggcggcatccgtacggtagaggatttcacggcgctgctgcgcgcgggcgcggataaggtttcggtaaactccgccgcgctgaaaaacccacaactcattgcggacgcggcgtataaattcggcagccagtgcgttgtgatggcgatggacgcgaagcgccgcccgaacggcgcgggctggacgctgtatttaaacggcggccgcgtggacacgggcattgacgccgtagaatgggcaaagcgcgcggagaaactcggcgcgggtgaaattctgctgacgagcatggattgcgacggcacgaaggccgggtatgacctggagctgacccgcgcagtttccgaaagcgtgggcattccggtcattgcatccggcggtgcgggcaagatggagcactttaaggacgcgtttacaaagggtaaggcggacgcggttttggcggcatcacttttccacttccgcgagatcggcataccggaactcaagggttaccttgcggaaaacggcatcccggtgcgccggtgaaatttaatagaatgattgaaggacactcccgcatatcttttggtgcgggggtgtttacttatgaaaagacattttcttggcttctgtttggctgctgtattgctgatcggtgtgttctgtccgcttgcgcgtgccgagacgccggatttccccgcgcaggctttggtgctgatggaagcctccacgggtcaggtgttatacgaaaagtctgcccatgtgcagcgaccttgtgcgtccatcacgaaggtgatgacgcttttgctcgtatttgaggcaatcgatgcaggcacgctgcatctggacgatgtgctcacggcctcggcgcacgcggcgggcatgggcggctcggacatttggctcaaggagggcgagcagatgaccgtagacgacctcatcaaagcgtgcgtggtgatgagcgcgaacgacgcggcggtcgttttggcggaggcagtcgcgggcagcgaggacgcatttgtggagcgcatgaacgcccgcgcggcggagttaggcatgaacgacaccgtttttaaaaactgcaacggtcttgacgaagatgggcacattacgagcgcttatgatgtggcggtgatgagccgcgcgttgatgcagcacgagaaaatatttgattacacgctcatctggattgattatgtgcgtgacgggcagacgcagcttgtgaacacaaataagctcgtgcgcacgtatgacggcattttggggctgaaaaccggcacgacaagtgcggcgggcagctgcatttcggctgcggcagagcgaaacggtatgcggctcattgcggtagtgctcggtgcggaaaatacgaaagaccgcttttcggccgcgtcttcgctgctcgactacggttttgtaaactggaagctgacgacaccggagctcccggaactgcccgagctgcccgttacgggcggcatggtgagcgccgtttcgcttgagtgtgaagctccaagcggcgttttaacagcctcgggcgacgcggagatcgggataaagctcattttgccggaaaacgttcctgcgccggtagaaccggggaatgtgctcggtacggcggaggtcgcgctgaacggcgacacggtgcagtcgctcaaaatcacggcgaaaaccgaagcgcccgccatcacattttcttccgcattgcaatattttttggcttgttttttcgcagcataagcggcgtgaaatctgatttgcaaaaaaaccttcgttaacttttcatgaaatccgcgttgtgcacttgcaaaatgcgtcaaattattgtatgatgaaagcacatagatttgacttgtggtgtaccttgcataaagtgggactgtgaaaacggtttcacacgtgcaaaagcatcatcatgcaaataggaggcaatagaaatggcattgaaattggaatgcggatacttgaagggctttatcggcgagcacgaatacgctgcaatggcttctcaggttgagagtgcacatgcgcttctggcatccggcaagggtccgggaaatgatttcctcggctgggtggacctgcccaccaattacgataaagaggaatttgcacgcatcaaggcggctgcggagcgcatcaagaagaacacggatgtgtttatcgtcatcggcatcggcggctcctacctcggtgcacgcgcagcaatcgagttcctcaagagcgagcactacaatgcactgaagaaagatacgccggacatctatttcaccggcaacagtatttcttccaccgcgctggcggagctggttgagatctgcgagggcaaggatatttccatcaacatgatttccaagtccggcaccaccacagagccggctatcgcgttccgtgttttccgcgagatcctcgagaagaagtacggcaaggaagaagcaaagaagcgtattttctgcacgaccgataaggcgcgcggcacgttgaagcaccttgcggacgaagaaggctacgagaccttcgttgtaccggatgatgtcggcggccgttactccgttctcaccgctgtgggtctgctgcccatcgctgtggccggtgcggatatcgacgcactcatggcgggcgcacagaaggcacaggctgcctacaacaacccgaacatggaagaaaacgattgctacaagtatgctgccattcgcaacattctttacaataagggcaagacgaccgaagtgatggtcagctacgagccgtgctacacgctcatgaacgagtggtggaagcagctgtacggcgagagcgagggcaaggacggcaagggcctgttcccggcatccgttgtcttctccacagacctgcactccatgggtcagtacattcaggacggcagacgcagcctctttgagaccgtgatgctgtttgagaagccgaagcgcgaagttgtcatcggcaacgacccggcaaacgtagacggcctcaatttcctcgagggcaagagcatggcgtatatcaaccgcaaggcgtttgagggcaccgtgctggcacacaacgacggcggcgtgccgaacgttgtgatctccgctcccgatttctccgaggataccctcggccagatcatctacttcttcgagaaggcctgcgccatctccggctatctcctcggcgtgaacccgttcaaccagccgggcgttgaaagctataagaagaacatgtttgctctgctcggcaagccgggttacgaaggcgaaaaagaagcactggaagcaagactttccaaataaaaaggcgtaaatccgcacctgcggaaaaaatacacaggaggacttcactatgatcactcttttaatcggcaaaaaaggctccggcaaaaccaagaagctcatcgagcttgcaaacgaagcggttcagaactccaacggcaacgttgttgttatcgaaaagggccttaagcttacttacgatatttcccacaaggcacgtcttgttgactccgacgcttacggcattgagggtctggacgcacttgtaggctttgtcagcggcatctgcgctgcaaactacgatgtgacggacgttttcgttgattccaccctgaagatcaccggcaagggcgttgaggaagttgagccgcttaccgcgaagctcaagacgctcagcgaatcttccaacgtgaacatctgcctgctcatttctgctgacgcagaggaactgccggcttccgttcgtgaatttgtcgcgaagtaatttcggcctcaaaaagcctttgcaccgcccgaaacagtaacgaaaagcagtgcaaaaacgaaaaaagcaacagtgtttcggcggaaacgacccgccgaacactttttttcgcggcataatgccgaattttcaaatttttcttgacaaaaccgcgcgtggtatttataatatatcaagtacggtatgaggaaaaactatgcttatcgatttgaaaaaatatttctcgggagaggatatttcacaggcgatcgattatacggtcgatctgtcggaggtggagattgacggctgtaagccgtttgtcacgccggttcaggtcaagggcagcatccgttcgttcgcttccagtgcggagctgaacgtggaggtgcgctatgcgtattcgatgccgtgcaacaggtgcttgacgttgacgcgtaaagagctttgtcacaacatttctcacgtgattgtgaacaagctgaatgatgaagaggattttgaagattatatcgtgattgaaggcgatgagctggatttggacgagctgatttattccgatatcatccttttgacgccgacgaaattcctttgtaaggaagactgcaaagggctttgccccacttgcggcaaaaacctgaacgaaggcgactgcgcctgtgcaaagcagcagacagatccccgtctggaggctctgcggcagctgctacaataattccagataaccaaagttttagtttaatataaggaggtgctgacgatggcggtacccaagagaaaagtgtccagtgccagacagaataagagacgttctaacgtgtggaagcttagcgctcctgcccttatgaaatgcccgcagtgcggagagtataagacacctcacagggtttgcggtaactgcggttactacaacggcagagaagttgttaagaaggaagcataattttgcctgaaacaataattgtgccagatagagaaggggcatttgcgtgctccttctctattgttttgtcggcattttttggtgccgagccgtaaaacagcggcaaatttcgcgcatactacctcaaaacggaagggagaaaagctgtggcagttgaaattttcggcgtggataaaaacagccttgccgagcgggccggcataaagccgcacgataagcttatttcaatcaatgggcatgacatcacggatattctcgatttccgtttttacgagacgaacacccatctgcatgtggtatacgaaacggcggagggcgagcggcacgaagagaaattcgtaaagccgcagtacggcgcactgggccttgcgtttgaaacatatcttatggacaggcagcgctcctgccgcaacaagtgcgtgttctgcttcattgaccagctgccgcccggcatgcgcgaaacgctctattttaaggatgatgatgaccgcctttcgtttttgttcggcaactacatcacgctgacgaacattgatgagcgtgagatcgaccgtatcattgaaatgcgcatcagccctattaatatttccgtgcataccatgaatcccacgctgcgctgcaagatgatgcacaaccgctttgcgggcgacgcgctgcgttttgtgcgcaagctggcggagcacaacatcaagctgaattgccagatcgtgctgtgcccggggctaaatgacggcgaggagctggaatttacgctttccgaaatgtacgcgctcggcgagagcttacagagcgtcgcctgcgtgccggtcggcgtgacgcgctaccgcgagggactgtatccgctggagacgtttaacaaggatacggcgcgcgcggcgatcgagattttggagcggtggggcgataaattcaaggcagagcgcggctcgagaaccgtgttcccgagcgacgagttctacctcattgcaaagcgcgagctgccgccgtatgaattctacgaggacttcccgcagatcgaaaacggcgtgggtatgctgcgcgacttagaagaagaattttcctgggcggttgaagacgaaccggagcgcgacataaagcgccgcgtgacgatcccgacgggcgaaggcgtgtatgcgtttatggagcatgtgatggactttgcgcgcgaaaaattcccggggctcgagatcaaccttgtgcctgtgcacaacgatttctttggcggtacggtcaacgtaaccgggctgctcacggggcgtgaccttgtgaaccgcttgagccgcgaaaaccttggcgacgcaattttgcttgcaccgtccatgcttatggcggacgaagatattttcttagacgatatgaccgtgcagcagctcagcgaaaagctgggtgtgccggcttacagaatgcataaagacgccgcaggcgagctcaaggacattttgggcactgcggagtaaggaaaaaagaaggaggaaaaccgtatgtcaagacctattgtagccatcgtgggccgaccgaacgtcggtaaatccacgctgttcaacaagctgatcgggcagcgcctttccatcgtggaggacacgccgggtgtgacgcgtgaccgcattttcggcgagtgtgaatggaaaaacagaaagttttcactggtagatacgggcggcatcgagccggaatcgaaggatattattttgtcccagatgcgcacgcaggcgcagattgccattgattctgcggactgcatcattttcgtgaccgatgtgcgcaccggcatggtcgcaacggacctcaacatcgcacagatgctccagcgcagcaatgtgccggtcatcgtgtgcgtcaataagtgcgatacgctgggcgacccgccggcggatttttatgagttttataacctcggcctcggcgaccccattcaggtgtcttccgtgcacggacacggcacgggcgacctgttggatgccgtcctcgagcatctgccggaggaaaaggaagaggaggacgagggcgagattatcaaggtcgccgtcatcggcaagccgaacgtcggcaaatcttcccttgtgaaccgcgtttccggcgaaaaccgctgcatcgtttccaacattgcgggtacgacgcgcgacgcggtggataccaccatcgaaaacaagtacggcgtatttacgttcatcgatactgccggcctgcgccgcaaaagcaaggtggaggattccattgagcattacagcaacctgcgcgccgaaatggcggtggacagggcagacgtgtgtgtcatcctcatcgatgccacggtcggttttacggagcaggactccaaggttgccggcatcgcgcacgaagcgggcaagggctgcatcattgcggtcaacaagtgggacgccgttgaaaaagacgacaaaaccatgcaggaatataagacgaagcttgaaaaggacttctcctttatgtcctacgcgccgatcatcttcatctccgcgcagaccggccagcgacttgaccgcttgtttgaactcatccacaaggttgcttccagcaacgcgatgcgcattacgaccggcaccttgaacgacattttggcacaggcaacggcacgcgtacagccgccgaccgataagggcaagcgcctgaagatctactacatgacgcaggcttctaccagaccgcctacgttcatttgctttgtcaattccaaagagcttttccacttctcgtaccagcgctatctggagaaccgcatccgcgagatcttcagcttagagggcacgccggtgcgcatgattgtgcgcgagcgcggcgataaggcggactgagggggaaggacttgatctacatggaaaatttcggttctttaattttgccgctgctgctttcggcgcttgtggggtatctgcttggcagtatcagctttgccattttgctgaccaaggcgtttgcgcacgaagatgtgcgcgcgcacggcagcggcaacgcgggcgcaacgaacgtgctgcgcgtggcgggcaaaaaagcctctgcgctgacgtttctgctcgatttctgcaagtgtgttgcgagcgttttggtcggctattttcttgtaaagcacgcgtgcgttgcaaacggcgtagaccccgaaatggcgcgccttggcatgtatgcggcgggcttttgctgcatgatcggccacatgtacccgctgtacttcggcttccgaggcggcaagggcgttgtgaccacggcggcgatgatgcttttgctcgactggcgcgtgttcctcatttgctttgcggtgttccttctggtgttcctgaaaaagcgcatggtctcgctttcgtctattacggcggcggcgatctatcccgttgtgacgttctgcatgacgtattttgtggactgctgcgtgggcgggttgccggtgttttacgttgtgatggcaacacttgtggcggcactgatcggcgctaccgttatcatcaagcaccgcgcgaacattaagcgcatccgaaacggcacggaatctacgatctcttttaagaaaaagtaagtgtaaagcgcggtatctatacagaaaaaggcgcgcaaacggccgggtttggcacttttcgtttacataatcttggaaaaaccttccaaatagcctgtggcttcttgacaatttttccattgtgtattattatgtttactggtcatactatattttgcgatcactttttctttaaatagatgcggcagttatgttttgttttagactgccttagttttttgcgcacggcattgggcttttttcgtacccgcgctgtgtagctgcccaatcggcggcagcccgtttcaggaataaatcagtcggtcacggaccggcgggcataacgaaagatcctacttcgtgcagcgcgttgcggcgctgtgtggcggcaggcagtgtgcctttgactgccgaggatatgccgcgcccgcagaaaggaaaattacagtggataaatttatcatcaagggcggaaagcgcctgcacggtgaggttgtcatcagcggcgcgaaaaacgcggctgtggcgatcattccggccgtagccatggcggaatctccctgccgtatagagaacgtaccgaacatttccgatgtgaagctcagtgcacgcatcctgaccgagatgggcgcgactgtgcgctggctcggcaagaataccgtggagatcgacccgaccaccatccacacgaacgtggtgccgagcgagttgggccgcaaaatgcgcggctcttactacaatatcggcgctttgctcggccgctgctccaaggccattgtgccgcttcccggcggctgcgatttcggcgtgcgccccattgaccagcacatcaagggctttaaggcgctgggctgcacgtacagcctcaacgacggtatgatcgaggtctccgcaaaggagctgcgcggtgcgcacatttaccttgacatggtcaccgtcggtgcaacgatgaatattatccttgcagccgtaaaggcaaagggccttacggttattgaaaatgccgcgcgcgaaccgcacgtggtcgatcttgcgaacttcttaaactccatgggtgcgaacgtcagcggcgccggtacggacgtcatcaagattcgcggcgtggagcatttgaagggcattacgtattcgattattccggatcagattgaagccggcacgtacatggcggctgcggctgcaacgcgcggcgatgtgcttgtgaaaaacgtgacgccgaagcacctggaatccatcacggcgaagctgatggagatgggtgtgacggtcgtggaatatgacgacgcggtgcgcgtgcgctgcgacggcccgctgagtaagtgcaacgtgaaaacgatgccgcacccgggcttcccgacggacatgcagccgcagatcgcggcgctgctctccattgcgcagggcacgagtattttgaacgagagcgtgtgggaaaaccgtttccgctatgtggaagagttgaagcgtatgggcgcacagatcaccgtagagggcaagagcgccattattgagggcgtggaatacctgaagggcgcaccggtgcgtgcgactgacctgcgtgcgggcgcggcgatgatcattgccggtcttgctgcgcatggcgtgacgaagattgaggacattgagcacattcagcgcggctatgaggacattgtggagaagttcgtcggccttggcgcggacatgtatttgatgctcgatcccacaaacagcgataccgcaaagatcggttaaaaccgtatacagaccgtttcgccccgacaaaaccttgtcagggcgttttttatgaaaacagggagggtgcaaatggcagagctttgcccgctgttcagcggcagcacgggaaacagttattatatcggttcaaaatcttcgggcattttggtggatatcggacgcagctgcaagcaagtgacgactgtcatgcagcgctgcggtatagacccgctttccgtgcagggcatcctcattacgcacgagcacagcgaccacatcagcggtctgcgtgtgttcgcttccaaataccacattcccgtgtttgcctctaagggcacgctgggggccttggaatcgatgggaattttaaacgacaaatatcccgcctacacgattgaagacacgttagagctcgccggaatgcacgtaaacgcgttccgcacgccgcatgactgcgcggagagcttcggctaccgcatagaagccgaagacggacacaccgtcacggtcgcgacggacattggacacattacgccggaggtggaagagaacttgcacggcacagaccttgcggtcatcgaatcgaaccacgatatcggtatgctgcgcacggggccgtacccgtacagcttaaagcggcgcattttatcggacttcgggcatctctcaaacaccgcgtgcgccgacctgctgccggagctttttgaagacggcacaaagcactttttgctggcgcatttgagccgcgagaacaacacgccggacattgcgcggcagactgccgtctgcggcatgcagatggcgggcgtggagaacgcggaggactacatattgcaggtcgcgccgattgaaaacctgaccggcggcgccatcacattttaacatagggagacaatatgctggaggtaaagctgatttgtatcggtaagctcaaagaaaaatattggcgtgacgccgtgcaggaatacgcaaagcgactttccgcattctgccggttccggatcatcgaactgaacgaagcgcgcctgccgcaggatccgaatgcggcggagattgcaaaggcgctcggcgaggaatcgaaggcgattttggcggcggcggggcgcagcgcgctttacacgctgtgcattgagggcaagctcgtctcctccacgcagctcgcgcagcagatcgacgcggcggccgtaaacggggagagcagcttagcgtttgttatcggttcgtcacacgggctggacgacagcgtgaagcagggctcgaagcgcatttccatgtcgccgatgacgtttccgcaccagctggcacgcgttatgctgtgcgagcagctgtaccgcgcgttttccatcaacgcgggcacgaagtaccacaaataatttgaatacgaaaggttgaacgacatgattaagatcgaacgtacaagcgtcatgaactttgaaaacgccatcagaggcgcacgcaaccccatgaacagctgggaccgcatggacagccacaccgagccggacggcacgttcgttttcggtgaaaacgacctgagccttgcaaaacgtctgtgcaaggcgggtacggatcaccgcaaatttatccgacagatcttcgtttcggtcgacctcaccgcgccgatctactggtggaaggaattcgacacgtataaggtgggcaccgtggcgaactccacgagcacgatgcacaaaattcaggcgaagacgtttgaagaagcggacttcagctgtgaccgtatggtgcccgcggcaaaggagagcctgatgcagaccattggcgtgctggaaaagctgcgcgtggaatttgtggagacgaaggacaaagacctttggtacagcctcattcagcttttgccttcaagctacaaccagatgcgcacctgtaccatgaactacgagaacattgcgaacatgtattttgcgcgccgccaccacaagctggacgagtggcacgtgttctgcgcatgggcagaggaactgccgtattttaagacgctgtttattgaaaacgacgcgtaaaaaggcgtaaaatacagaagatcggtaggtaaaatgcgctgccggtcttctttttatttctaaaatgtgaattttttgaaaaaaactgcctcatcgatagtttttttattccaaatcccttgacaaattgcaaaaataaaaatatactgatattactttcgacaggattagttgaaacaatatggaatatgaaaattgtcaggaggatatagcatgaaaagaaaaaaaccatatatccgtttaacgaattccgaatttgcgatgatgcagctcctttgggaggccggccgtccgttgaaccgcgcagagatcatggagattgcgctgcgtgacccggagaatccgctgtttgcgaagaactccttccacgttatcatcaacaatctgatcggttaccagttcattgcagctttcatcaatgacggccccggcagaaagaatgcccgccgcttcgcgcctttgctgacccgcaatgaatatgccggtttgcagattgctacgactgagcactacaaggcttccgatattccggagattgttgccgctatctttaagtacacgaaggacgcgaataaggaagagcttctcccgaagattgaagaagctgtgcgccgctgcaagtaaacggaaaacaacatgcgctatgaagacggcaggggttgctctgtcgtttttcttttttacaagaattcgaccggaaagcgcctgaatatacagaattatataattatatgcaaatttgatataatgagaagcgaaattgacggaacggatttttaaaaaagacaatagttgttgccacaaaagtacaatcagtgagtttttatattacttgttcctgttattgtcataaagaaagaagcggagatgcccttaaaaaccggggcgtctccgctttttgcatgcaagtagagtttaaagtgtcagtttcatgccgtcgtaggaaatttcgatgtcgtgcggcgcggcaagctccacgagctcgtcatacagaagatgaccattgtgcgagaagtggttcatcacgcagtgggtgtgtttgtcaacaataccgagcgcttcgagctcctccttgaggcggatgacctccggcgcgcccatgtgcgtgcttttaaagccgcagtcttcatagccgagcgtagtgtcgaagctgaaaagatcggcgggctttttctgcgccttgaggtaatcccacacctctggaaaatagtagccgctgtcgtgcatatagaagacagatttatcctcgcgtgtatcgacaatgtggtacacgaacggctggtgcgaggggttcatgtggtttgcgggcagcggcgctacgcggtagggaccggcttccacggtctcaaacggctttaagatgtgccagtgcatggcgctgtcgcttttttcgtcaatttcccaatcggcacagcggcggaaataatcgtaggtctcctgtgcgcagtagatttcaagctcggggctgatcatctcaaggctgtaaacggagccgcgcacggtgagctcctgcgggtagaaatgatccatgtgaaagtgcgtgacgaacagatacttcacacggctgagatcgagatgattcatgagcttgtgcatgtaggtatccggcggcaggtcgagcagaagatcgtcgttgacgatagcctgcgagcgtgtgcggatgtttttgccgccgaggcgctgcgcctctaagcaatatttgcagcggcagaatacggcaggccagccctctgcggcggcggtgccaagatattgaaactgcattttgtacctcccaaatcgagaatagacttttctatttgattatacgggcgaaaggacggaaaaacaagggtaattccgtacaagaaaaacgtcgtgcagtaccgcacttagcacaatgaaaaacgcctaaagcgtttcagccttaggcgtttgccggaaaacggagatttttatgcgtcgatcttcatgtcaccgtccttgacccagccgatcttgcggaagatgaggtcaaagacaaaagaaagcacagccgggagcacaaagcagatgagcacaaggcccagccagtccatagcggtgacggctgttttggcaccggcagtaatgtcgttcagccagccggtataaacgccgatctgacccacaaggccgcaggtacccatgccgctggagatcggtgcgccgttcatctgcatgccgaaaatgcatgtcgcgatggggcccgtcacagcggaagcaagcgtaggcgcaagccagatgcgcgggtttttgatgatgttcggcacctgcagcatggaagtgccgatgccctgcgcaaagaagccgccccagccgttatcgcggaagctgatgaccgcaaagccgatcatctgcgcacagcagcctgcaacggccgcgccgcccgcaaggcccgttaaaccgagcgctgcgcagatggccgcgctggagatcggcagcgtcaatgcaacgccgacgatgacggaaacgagaatgcccatgaggaacggctgctgggtggttgcccacatgataaggttgcccacgctggaagccgccgtgccgatgtacggcgcgaataagtacgcgaggccgcagcctgaaaaaatggtgacgagcggcgtgacgatgatgtctaccttcgtctttttgctgacgagcttaccgaactctgccgcgatgatggcgagcacgagcaccgcgagaggaccgcctgcgccgccgagcgcgtttgccgcgccgccgactgcgacgagcgagaacagtacgagcgggggcgcctgcagcgcgtagccgatggcgaccgccatagcgggaccggctgcggactttgcatacccgccaatctcatcgagcagcggaatgttaagctgtgtgccgagcgtggaaatgatggtgccgatgagcagggaagcaaaaagcccctgtgccatggcgctcatggcatcgataaagtagcggtgcagatacaccttgactttgctttcttttttggaagaagttccctccatttttgttcaatcctttctttttacggagcgcgaaaggttctccggcgctcctgggttttacgcaaacatgcgctgcgcagaatacgcgagaaagaatctatattgactatgttgccgtctgcctctgtccgttttcggaagaacgctgcgccgccggggggttcccgggctatttggtcacagcggccgcgtaatggcggtacatcggcaggcggccgtttgggttatacgttaaagaataccacaaaattcccctgtttgcaaggcggctgcaaaaagacggagttttccatagtttcccttgcaatcggcggcgaaatatggtatactatattaataagcaatttacggtttagaccgaaagggaatttatatagatgcgtattaaacgcgtgggagaccgcgcgcggagaggagttataaaaatggaaaacaaaaagtatgtcatcggcgccgacatcggcggcacgacggtgaagctcggtttatttgaggaagacggcgctttgcttgaaaagtgggagattccgaccgtgattgagggcgacggcacggcggtgctgcgtgatattgcggcggaaattcaaaagtgcagagaaaagcacaacattcccgcagacggcattttgggcgtgggcgcgggcatccccgggccggtgacggcggacggtgtggtgcaccgctgcgtgaacctcggctggggcgtatttgatgtgcgcacggcgctggaagagaccgtaggactgccggttgtggtcgtgaacgacgcgaatgctgcggcgatgggtgaagcctggaaaggcggcggccgtggcagcgagaacgtggtattcatcacgctcggcacgggtgtcggcggcgcggtcatttcagatggacacatggtggcaggcgcaaacggcgcggcgggtgagttcggccacatgacgatcaaccccgcggagacggagacgtgcgcgtgcggccgccgcggctgcgtgcagcagtacgtttcggcctcgggcattgcgagactggcacgaaaataccttgccgaacatgaggaagaaagcgctttgcggagtgtcgagaagctcacaacgaaagacgtgttcgatgccgccaaaaacggagacggcgcggcaaacgcaatcttagagaatgtgtacgatgcgttcggctacaccatctctgccgtgtgcacggtggcagatcccgaggtcgtcgtcatcggcggcggtgtctcgaaagcgggcgagatgctcgtagaaggcgtgaagaaaggcttcttgaaatacgtattttacccgaacaccgacgttcggttcaacttggccgtgctcggcaacgacgccggcatttacggctgctgcaagctgcttttggacagccttgcgtgataagaacggaaaggatagggagaaatggataattccaaaacggagctgtttgaatcgatgccgatcccgaaggcggtcgtaacgctttcggtgccgtcggtcatcagctcgcttgtgatggtcatttacagccttgccgatacgttctttgtcggtatgatgaacgacccggtgcagaacgccgctgttacgctggcggcaccgcttctgttggcgttcaatgccgtcaacaacctgttcggcatcggcagctccagcatgatgagccgcgcactcggacgtaaagactacgataccgtgtaccgcagctcggcgttcggattttacgcgtctttgatttgcagcctgctgttttctttgctgtacggcgtattgcagtcgccgatcttggtgatgctcggcgcgaatgccgaaacgatacaggcaacggcggattatttgttctggactgtgctgctcggctccgcgccgtccattttgaacgtcgtgctggcgtaccttgtgcgcgcggagggctcttcgctgcacgcgagcatcggcaccatgtgcggctgcctgctgaacattgtgctggacccgattttcattctgccgtggggcctgaacctcggcgcagcgggcgcgggctgcgcgacctgcctttccaacacggttgcatgcctctacttcttcgtgctgctgttcgtgaagcgcggcaagacatacgtgtgcatcaagccctccatgttccgcccatcgaaacagattgtcaagggcgtgtgcggcgtgggcatcccggcttccatccagaaccttttgaatgtgaccggcatgaccattcttaacaactttacgtccgcgtatggctctgacccggtggcggctatgggcatcgcgcagcgcgtcaacatcgtgccgttccagattgcgatgggcttttcgcagggcattatgccgctgatcagttataactacacgagcggcaatatcaaacgcatgaaaaagacgtttatgttcacggcgaaaatttcgcttggctttattttggccgtgatgctgacgttcgtgtttgcggcggagccgattatctccatgttcatgaagaacgagagcatcgtcgcgtacggcgcggcgttccagcgcggcttctgctttgcgctgccgttcttgtgcatcgatttcctcgcgctgggcgtgttccagtcgtgcggtatgggcatgaaatcgttcatatttgctgttgtgcgcaagatcgtgctggagattcccgcgttgtttgtgctgaattggctgttcccgctgtacggcctcgcgtatgcgcagttcgtcgcagagctgatcctcggcaccatcgccgttgtcgtgcttgtgcgaatgttccgcaggctcgaaagagaacatgccgcaccgtatgtgagcgattcggaaagcgtgaagtaacaccgttctgccgggaagcgtggctaaaagttttcgccagcctttagaaatagaatataaagctaaaaaggaacggtttgtacaccgttcctttttgcatacaccgaaaataacgcttgactttttgctttctatccgttattatgaaaataataataattattattttaatgggaggagcaaaatgaataacaaagcgttttataatttgacatacggcgtgtttttgttggcggcaaaagcggaggaaaaggcgaacgcctgcattgtgaataccggcgtgcaggtcgcggggagccctgtgcgtgtggcggtttccgtgctgaatacgaattacacctgcgcgcttattaaggaaagcgggcggtttacgttgagcgcgttggatgacagctgctcgtttgagaccattaagcacttcggtatgcagagcggtcgcgacgtcgataagctggacagcctgccgatgccgacagacgaaagtggcgtaccgtatctgaactggagcacctgcgcgcggttcagcggcaaggtaacgcacagtgttgacctcggcacgcatacgctgttcattgcagaggtgacggaagccgaggtgtgcagcgaccgcgctccgctgacatatgcggattaccagaataagctgaagccgaagtcggagaaggtcgagcgagagcggaagatcgtcggctggcggtgcaaaatttgcgggtatgtgtatgagggcagcgcgctgccggaggactacgcatgtccgttgtgcgggcacggaacggatgattttgagccggtttatgaagagtaaaggaaaaaggaacggtttgtacgccgttcctttttgcatgtcctattaaaatttacagcgatatttcacgggtgtgaagagcgaacggtgtaaagcatagggcttccttaccgaatggctttttgcttatcggcaatgcgcaggaagatgaagccgagcgcaaagaacactgcgagacatgccaccgccacgttgatggtgccgcctgcaagctttacggccgcgatgaccgcagagccgaggaaggacgcgccttttgagaaaatatcgtagataccgaagtattcgccggagttttccgccgggatgatcttggagtaatacgagcgcgagagcgactggatggagccttggaagcagccgatgaagaacgccagaatcgcgaagtgcaggagactgctgagcatgagcgcgtacagcgcgatgccgaaatagcccgcaatacaaacgagaatgagcgtgacggtgttgcattttttcgaaagctttgcgaaaacgagcgagccgccgaacgcaacgacctgcgttgcgagcaggaagacgacctgaccgaccgtgttgaggttcaggtctgtgccgatattgatggcgttatcgatgatggtgcccacgccgtctatgtacaggaagaatgcgatgaggaagaacagcacctttttgtcgtgcgtcgcgatgtttttgagggtgtggaagattttcgcgaatgccttgcggatgtcgtgtccctcggtttccacatagttgcgctgcttaaagccgcgaatgagaggaatggtgacgagcagccaccacacggcagtcaccgtgaagccgatgcctttagagagaatatccggcagcacgccgaccatatcgggtccaagcacataggcgatgagcgcgatgaggaacgggatgcacgagccaatgtagccccatgcaaagccgtaggacgaaacctcgtccatacgttcttcgctggtgatgtcgttcagcatggaatcatagatggtcagcgacgcgctgtaacaaatcttcgtgaacacaaaaatgatgaggaacagcagccagccggtgatgaagccgtttaaaatgcagccgaaaatgccgagcgttgccgcggtggtgaacagcacctttttcttatctttgtggtcggcgagcacgccgaagatcggccctaaaagcgccacgataacggtgacgaccgccacggcgatggaataatacgccgttgcctgatgcgagttgatctgccccggcgcagtgccgatggcgaggctcttgaaccagatagggatgagcgagcaggagagcatggtgaacgcggaattgcccacgtcgtagagcacccatgcgaattcctgttccgtcagcccgcggaagaccttgagccggttgagtgcgtgaaaaattgatttcatgtgaagaccttactttctttttaaaatcaggtgcgtgctttcggtcttacattgtagcgccgccctgttaaatccgtgatgtcggtttgtaaaggggaggaaaattatgcactcctctttgtccattgtgtccctctaagctttacaaaaattatcactgtgtctattttatcatagatacgaacaaaatgctataaaattatttttgcatcgatagaaattcgggcagaatataacacaatatacaaaaaagagcggggagaacctcgctctttccgaatttatatgtatggtttatgtatcgaggcgctctaaatcggcgcagatgcggtcgatgatctcgtcctgcatcatgtcgggcgtgagggtctgctcgtttaatgcgggggcgtagtccttttcgttccaccatttgcgcatttcctcttcgccgaactccgtgcgcttgtccttcgtttggtggcggcggagcgtctcctcaaacgggaggtcaaaatagtacgcgcagatgttttcgccgtagagcgcttttgcggcatcgaaaagcggggtgtaccatcggctgttcaaaatgccttctaaaatgacgagctcgttgtgcgcgtggccgtactcaagcagcatgatgagcacgtcgtttgcgcgggtgcccgcgccgtcgttcgtctttaagatgtcgcggcggatgacatcttgggacagcagcatggtgtttttgccgaacttttcctgtaaagctcttgcgatggtcgttttgccgctgccactgttgccgcgcagggtgatgagttttttcatggggtgtgctcctttacactttttttgatgggatggcgaatgaccgttttccacttttccggcgcgaccttacgggcatcgctgaggtagatctcgtggtgcaggcgcgcggcggtaaagtcgtttatatagccgttttcggcgagaaacgtgttcatcagcgccacagatgcgggctcatcgtcaaacgcgccgtggtgcatgatctgcacgcaaaggccctcgtcgatcgtcaaaaactccgctttgctgcaatcaagctttttcttcttttcggcggtctgcacggcccaggcgaaatcatccggcgtgatgaaatccggcaggcggatgacggagacccagtggaaagcagatttatcggcataatcgatgctgtccgtattctcctgccaccaaaagccctcaagcggcggcacgacatactcgaaaaagccctcgatgcggtggtcggtcttgtagctcattttaagcgtgtaggcgatcgcgtacaaaacgctgatggcctgctgatacgcgccgtccggctcgtttgagtcgccggtgccgcgcactgcaatgtagtttgcaggcggcacagtgacgatctccggcttgtttttcggcatgtagaattctttgtattctttcttaaaatcaaagggcatgggaaaacctcatttcataatattgttacgacccggtggagcggtaatggcgcacgccgaatttccaaaagagatagcacggcacgataaatacgcaggcgatgacgggcagaagcatcgcgcgggcatcgttgtggcggccgatgaggtacatcagcgggtaatactgtacgagcgcgtaggggacgatgtaggtgcagaacgtcagtacgcctttgccgtaaatggaaagcgggtagcgcccgtgctcgcgcataccgtctgttaaaatattgatgaactcgagtccctctaatgtgaaaaagcatagcccggcgaagatcaaatacacgcctgcaaaaagcacgacgccgcctaaaatcatgaaaatgagcgtcataacgcgcgcggcgcaccaatcgattgggcaattttgaagcgcccagatcagcaggaaaatcgccataatgcccttgccgaagcgctctaaatccatgcggctgcacaggacgaggaaaacctcgttgcgcgggcgcaccagaacgcggtcgaactcgccgtccccgatcatgcggttaaacgtatcaaacccacggaagaacagctccgcgagcgagaaggataacagcacgatggcgtagcagagcgaaacctcggtgtacgtgaagccgtctacctggttaaaccgcatgaacatgaactgcacgccccaaaagcatgtgagcggtataaatagctgtgccagtgcggaaagtaagaacgaagccttgtactgcattgctttcttgatatggatagacagaaattcaaagtatagtttcatagatgacccctttctttgtatactgcaaaacacgaacgatttgccgggcggcggaacgacttgtcgttccgtttatcctccctgaatcactacccgcttcagcgcatttttcatgagggtgtgaccgccgagcaccaggacgagcagccagaagatttgtaagcctacggcgaaagcggcgttcgtgccggcaatatcgccgctgtacacgcggtacggcacgttgcttgtggaagcgaagggggtcagctcgctgattctgcgcagtgcgggcgggaagaacggcagcggcactacgccgccgcagagaaaatctgccagtgtgagcagcagggagcgcaacccggtggaagaaagggtatacatggtgaggacatagatgagcagcgtgaacgccgtgctgttcaatgcgcccagcaccatggtgagcagaaatagaaagaatgtgggtaaatctgtcggcgcggtcaagttatagcctgcgggcagaagcgccgcaacgactaagactggcacggcgcgcaatgcaaccttggaaatacgaccggagagagaattcgtgtaccacatggcgtagaggtcgacggggcggcacagcgaatacgagatgctgccggaggtgatttcctccaaaatgtcgctgtccaagacccacgaggcgaacatagctaaaaacgcctgctgtatccatgtgtagttgacggtcgcctgcaaggccatcggaaaagcggtggggtcactgcggtaaaacgcgtggtaggcgaagatgatcaaaaagccccacgcaaattgcgtggagatgcctgccaatgccgctgcgcggtactgcaagcctgtcacacagcgcaggcggaaaaacgaaatgtattttttaagtttcacggcgcacctcaaatatcaaactgtttgtagagcgccgcgagcgtttcgtcaatctgcccgctgccgccgtgccggatatcgtcgagtgtgccgtctaataaaatgcgccctttgccgatgagcaggacacgctgcgccaaggcttccacgtcctgcatgtcgtgcgtcgttaaaatgaccgtggtgccgcggcgcttgttcatatcaagcacgaattcgcgaacggcgatcttcgataccgcatcgagcccgatggtgggttcatccaaaaacaagatgcgcgggtcgtgcagcagggaggcggcgatctcgcaccgcatacgctgcccgagcgacaggctgcgcgccggggtctttaagagctccgataaattcagaaggtcggttaaatcccgtaaatttcgcttgtaaacatcttcggtcacggcgtaaatgtcgcggataagctcgaatgaatcaatgacgggcacatcccaccataattgactgcgctgcccgaacacaacgccgatctgcgaaacatgcgcgcggcggtctttccacggcacgcgcccgtcgatgacgcaggtgccgctgtccggtgttaaaatgccggagagaattttgatggtgctgctttttccggcgccgttcgggccaatatagcccacggcctcgccgtcttcaatacggaacgaaacatcgtttagggcgtggatttcttcgtactcgcggctgaaaaatgcttttgcggcgtttttaaagcctgcgtttcgttttcgcacgcggaaggtcttttgtaaatgctctgcctgaatcatagtatactcctcttttccgttaacggtacggactttcgggctaatgcgaacacagaaactgaaacacgggctatcagtttaatacaatttttataaaatgtcaataatttgcacaaaaaatcctgaaattctattacaaaaagtgaaattatggtgaagacgctttttttcggtatctttacatataaacaggaatttggcactgtggagccggaaatgctaaaagaagcttcaaaacggatgccgaccgggaaaaattcgcacattcacaaagtatttacaaattttggtgttgacatttcctgacctttgcagtatagtatagacaagggttagcactcgggaacatagagtgctaaaacctgagaggtgcaagtatggaactgacaaaacgcaaacaaaatatacttgcctcgatcgtagacggatacattcgcacgggcgagccggtgggctccaagtccattgcggaaaaagcaggtgtttcttccgcaacggtgcgcaacgagatggcagagcttacggagctggggcttttggaacagccgcacacctccgcggggcgtgtgccttcacaggagggctaccgcgagttcgtagatgcgctgatgcagccggaaacgttaacggaagccgaaaagcttacgatagacgcgatgcttgcaaagagcgcgtttgacccggaacgattattgcgtggcgcggcgaaaacgctggcggcttctacacggtaccttgcgttgagcaccacgccgagcggcgcggatgcaaagatcaaggcggtgcagttcgtgcagacgagccgccgcaccgcaatgctcattatgatgagcagcgcaggtaccatgaaaaacaaggtgtttcactgcgactttgatctttcaaacgagattatgcgcattttcttccgcgtgctcaacgagcgcgtgacagggcgcgacgtggcggagattaaccgggcatttgtgcaaaaccttgcgatctcgctgggggatatggcaattttgatgtcgccggcgctggcggcgcttttggaagtggcgcttgaaacgatgcagacggaaatttccgtaagcggtcagatgaacctgctgttctacccggaatacaagcttggcggtgcacgccgggtgatggatattctggaaagacgggagcttttgacagaacttctcgcaggcaagcagaaccgcacgcagatcaagatcggcacagagaccgggcagaacgccttggcggaatcgtcggtcatttgcgcacggtacagcgtgaacggcagagatgccggcgcggtcgccgtgatcggcccgatgcggatgcagtacgcacacgtcgcggcacaaacagcatatgtcgcagatcgtgtaggcgaaatgcttacgcgcatcatgcgggaagaatagagaaaggagcgttgccagatggcagaggaaaagaagcctgttcaggaacccgagcaggaagcgaataccgagccggcagaggaatctgcaaaggctgcggaaaaggagaaaaagaaaaagaagagcgagaagattccaaaagaggattacgaccgcttgcaggcggagttcgacagccacaagcagcagcacctgcgcgtgcttgccgagtacgataacttccgcaagcgttccgcaaacgaaaagaacgccgtttacaataacgccgtttccgatacaatcaacgcgattttgccggtggccgataatatcgaccgtgcactggcacaggaaaatgtctccgcagaggatatgaaaaaaggcgttgagatgattgcaaaccaatttaaggcgagctttgaaaagcttggcatccgagaagtcggtcaggttggcgagccgtttgacccggcgctgcacaacgcggtggcgcacattgaaagcgatgagcttggcgaaaacgtcatttcggcagtgttccagaagggctacatgctgggcgataaggtcgtaagacacgccatggtacaggtagcaaactaaatcagcaaatatccatttatatagtaattcagaattcacacactcatttgagttaaaggaaggtaattgatatggcaaagacaattggtattgaccttggtacaacaaactcttgcgtagcggttattgaaggcggcgagccggtcgttatcgcaaacgcagaaggcgcaagaaccaccccgtccgtcgtggcattctccaagacaggcgagcgcatggtcggtcaggtcgcaaagcgtcaggcgattacgaacccggaccgcacgatctcctctattaagagagagatgggcacagaccacaaggtgacgatcgacggtaagagctacaccccgcaggaaatctccgcaatgatcctccagaagctgaagggcgacgcggaagcttacctcggcgagagcgttacgagcgcagttatcaccgttccggcgtacttcacggacgcacagcgtcaggcaacgaaggacgcaggcaagatcgcgggcctcgatgtaaagcgtatcatcaacgagccgacggcagcagcactgtcctacggtatcgataaggaagacgaccagaagatcatggtttatgacctcggcggcggtacgttcgatgtttccatcattgagatgggcgacggcgtacaggaggttctggctacggccggcaataaccgccttggcggcgacgactttgataagcgcgtcatggattggatcatcaacagcttcaaggtttccgacggcatcgacctttccggcgataagatggctatgcagcgtattaaggaagcggcagagaaggcaaaaatcgagctttccggcatgacgagcgcttccatcaacctgccgttcatcacggcggatgcgaccggcccgaagcaccttgacctcacgctctccagagcaaagttcaacgagctcaccgcagacctcgttgagaagaccatgggcccggttcgtcaagcactgagcgactccggcctctccatcggtgagatcaacaaggttctcatggtcggcggttcctccagaattccggctgttcaggaagcagttaagaagcttatcggcaaagagccgttcaagggcatcaacccggacgaatgcgttgcaatcggcgccgcacttcaggcaggcgttctcggcggcgaagttcagggcttgctgttgcttgacgttactccgctttctctcggtgttgagaccatgggcggtgtgatgacgaagatcatcgacagaaacaccactatcccgaccaagaagagccagattttctccacggcggctgatggtcagacgcaggttgaggtcaacgttctgcagggcgagcgtgaatttgcacgcgataacaagcagctgggtctctttaagctcgacggcatcgctccggctccgcgcggcatcccccagattgaagttacatttgacatcgacgcaaacggcatcgtaaatgtttccgctaaggatctcggtaccggtaaggaacagcacatcacgatttcttcttcctccaacatgagcaaggaagacatcgataaggctgttaaggcggctgagcagtttgcagaggaagacaagaagcgccgtgaagaggttgagacgaagaacaacgcagagaacctctgctaccaggcggagaagctcgtaaacgagagcggcgacaagctggaagaggcggacaagaccgaagtgaacaacaaggttgcagctctgaagaccaccatgcagaacggcacggtcgaggagatcaagtccggcatggatgagctgcagaaggcgatttacgcggttagtgagaagctgtataaggcaagtgcaccgcagcagggcgagcaggcagccccgggcgcaaacccgcagcagggcggccagaacccgaacggtgacgtttacgacgcagactacaaggacgtcgattaagttttataaatgacacgttcaaaagcgcaaggggagccgaaaggcgtcccttgccttttggagtttgcgaggagatgacagcggatggcggacaacaaaagagattattatgaagtgcttggggtcgataagagcgcaacagacgatgtgattaaaaaggcgtaccgcaagcttgcaaagcaataccacccggacttgaatcccggagataaaaatgcggaagcgaagtttaaggaagtcaacgaagcgtatgaggtgctttctgataaagacaagaaggcgcgctatgaccagttcggctttgcgggcgtagacccgaatttcggcggcggcgcgggcggcggaaatccgtatgccggcggcgcaggcggttttgatttcaccgatattttcgacagcttcttcggcggcggtttcgggggcggcggacgccgtgcgaacccgaacgcaccgcgccgcggcagtgacgtagaggcaagcgtcaccctttcgtttgaggaagcggcaaagggctgcaagaaaaatgtgacctaccaccagatcgaaaattgcccggattgcaacggctccggcgcggccaagggcacaagccccaagacctgcccgaactgcggcggctccggccaggtgcgcatcaaccagcgcacaccgttcggcgtggtgcagtccacaagcacgtgcgaccgctgccacggcagaggccagattgtcgataccccgtgcaaaacgtgcgacggcaagggcaagatccgccgccagaagacgatcgagatttccgttccggcgggtatcgatgacgatcagattctgaatgtcggcggcaagggcaatgccggctccaacggcggtccgaacggcgacctgcacgtatacattacagttcgtccgcatgccattttcacgcgccgcggcaacgacgtttggtgcgatatgccaatcacgttcacgcaggctgcactcggcgcggaagtcacggtgccgacgctcgatggtaaggtgagctacaccgtgcatgagggcacgcagccgggtgacgtgttcaagctcaagggcaagggtattcagaacatcaacggcagaggacgcggtgaccagtacgtgcgcgtaaccgttgaagtgccgaaaaacctaagcaagcgccaaaaagagcttttgcaggaatttgaacagaatgccgacgaaaagaactaccagaagcggaaaagcttcttcggcaagatcaaaggcatgtttgaagactaaacacatgaaagtttaaagtatcctccgttctgaacagagcgggggatattttgctgcataagctctttacattttcaactttgcgctcgttgtgcagcttggtatcggcattttggcgctgcccgacaattttcgtgcattttttgttgcaattcggtgcgtttcggactataataaatagcagaaatcaacaaatggaggttgataaaattgaaaaagagaatatttgcgttgtgcagcgccttgctgctcagcctgactgtgttcgcgggctgcggatcaaaaccgacggaggagagcgccgcaagcgagccggaagcgactgccacggctgctccgacggcaaaggcggaatcttccgcagcagagagcaccgcggaacccacggaagcactttccacggaaccggcgaatgtgaacctgctcaccggcctgccgaccttgacggacggcgccatcggtaaacgccctgtcgccgtaatggtgaataacgtagacgccgctctgccgcaatatggcatctccgccgcagatcttatttttgagttaccggtggaatacgacctgacccgtttgatggcggtgtacggcgactacacgcaggtgccggacgtgtgttcggtgcgcagctgccgatactattatccaattttggcggtcgggtttgatgcggtttacgtgcattggggaattgacccgaccattgcgacggagacaatcaatagcatggagattgatcatttcgatgcagactattacggtacaggcaagtattttggccgtgataaggatcgtatcaatgcgggctacgcctgggagcataccggtatgttctacggtacaaaggtgccggaaatgctggaagatagcaatgttcgtaccgatttgaaggaagataagatgggcacagcgtttaagttcgttgagatggacaaaaatgctgctccgagcggagaggatgcaaaaaatatccgtgttgactttggcgcgaattacagtacattcagctatgatgcagacaggcatgtgtacatgaaaaactaccagaacaagccgcacatggactgcaaaacaaacgagcagctgcaatttgagaatgttatcgttttggaagcggacatttccctgcgtccgaacgatgttgatggccacaagcttatcaactgggaaggcggcgaaaatgcaaagggctattatatttccgagggcaaaatggtgccgattacttggtctaaggccggtatgtatgacccgctgaagttctttgacgcgaacggcaacgagttgcagctcaatcgcggtaagtcctacattgcgttcacctatgcgggaaactgtaaggttgaagggtaaaagttaagaaaacagacaaaaagagctatctgacttcactaacagaaatcagatagctctttattcttggataatctaaaatgttgtcattttgttgccacggagcaattcctgggcgcaaaagtccagcattttcaaggctttttggcctttcgagtattattcaaactcgatcgttgccgggggtttgccggtgcagtcgtagagaacgcggttgacgtgctggacctcgttgacgatgcggctggtgacggtttggagcaggctccacggaatctcggcggcttcggccgtcatgaaatcggtggtggtcacggcgcgcagggccacggcatagtcgtaggtgcgctcatcgcccataacgcccacactgcgcatgttggtcagcgcggcgtagtactggctgatgctcttatcgagaccggcttttgcgatctcctcgcgccagatggcgtcggcttcctgcaccatcttgaccttatccggcgtgacttcgccgatgatgcggatggcaaggccggggccggggaacggttggcggctgacgaggtattccggcagacccagctcacggccggcttgacgtgtctcgtccttaaagaggtcacgcagcggctcgacgatctccttgaaatcgacgtaatccggcagaccgcctacgttgtggtgcgacttgatgacggtgctttcgccgccgaggccgctttccacgacgtcggggtagatggtgccctgcgcgaggaaatcgacggcgccaatcttctttgcttcttcttcaaagacgcggatgaactcttcgccgatgatcttgcgctttttctccggctcagatacgccggcgagcttatcgtagaagcgctggcgagcgttgacgcagacgaaattgagctcgaattggccgttcgggccgaagacctcgcagacttcttccatctcgttcttgcgcagcaggccgtggtcgacgaatacgcaggtgagctgcttgccgacggctttagagagcatggctgccgcaacggaggaatcaacaccgccggaaagggcgcacagcactttgccgtcgccaatcttctcacgcagcgccttgacgctcgtctcgacgaaggagcccatttcccagtcgcccttgcagccgcagacgttgtagacgaagttgtgcagcatcgtcttgccttccggcgtgtggagcacttccgggtggaactggaagccgtagaggttcttttccggcagctcgatggcggcgaccgggcagttatcggtatacgcggagattatgaagcctgtgggcgcggtctcggcgtagtcgttgtggctcatccagcaaatggtctccgggctgacgttctcaaagaccttggacttggtatcgacgtgaaccagcgttttgccgtattcacgctccggcgccttgcagacatgaccgccgagcagatgcgtcatgagctggaagccgtagcaaagtccgagcacggggataccgagatcgaaaatcgcgggatcaatggtcggcgcaccgtcgacgtaaacgctgttcgggccgccggtgaagatgatgcccttggggttctgtgcgcgaatggcgtcaagacccacgcggtaggacacgatctcgcagtatacattgcactcgcggacgcggcgtgcgaccagctggttatactgtccgccgaagtccactacgagcactttttcgttttgtggcatattacaccctgccttcctgaatttaaaacgttggttcaacgattgaatacaattctattttactccactgtgacagattttgcaagattgcgcggcttatcaatatcgcagcccttcatggaggcgacatagtacgcaaacagctgcattgggatgactgagagggaggggagcatgaacgatgcggtcttcggaatgtagaacaccatatccgtctgcccggcaatctcttttttgtcttccgtcgcaacacccagcacgacagcgccgcgtgcttttacctccttgatgttcgacatcattttatcaaagaggcgggcgtcggtcgcaagcgcgatgacaagcgtgccgtcttcgatgagggagatcgggccgtgcttgagctcgcccgcggcgtaggcctcggagtgaatgtaggaaatctccttgagtttgagggaagcctccagagacgcggcgtaatcgacattgcggccgatgaagtacatgtcgctcgcgttgaaatacttggaagcaaagaactgaatattctccttgtgcttcagcatttcgtcaatctgctccggcagcttttcgagcgccgcgatgtatgcactgagctgctcctgcgtgaatttgccgagctgctcgccgatgtacagcgccagaagataaatgaccgcaagctgcgtgctgtatgcttttgtggacgcgacggaaatttccgggcctgcccacgtatacagcacgtcgtccgattcggttgcaatggtgctgccgacaacgttcacgacggagagcacacgacagcccgcacgcttcgcttcgcgcagcgccgccagcgtatcggcggtctcgccggactggctgatgatgatcatgagcgtgttttcgttgaggatcgggtcgcggtaacggaactcagatgcaacatccacttcgaccgggatgcgcagcagctcttcaaacgcgtactttgccacgacgcccacgtggtacgccgtgccacacgccacgatgttgatttttgtgaagcggcgcagctcctcggcggtcaaggtgatgtcatcaagcacgatgtgcccgttgcggatacgcggtgtaatggtatcacgcacggctttcggctgctcgaagatctccttcatcatgaaatgctcaaagccgcccttttcggccgcttcaatatcccactcgatgtgctcgatctctttttcgaccggctcgccgtctgcgttatagaacttcacgccgtcgcgggtgagttctgcaatttcgttatcctttaagcggcagatctcgcgcgtctttgataagatcgcgggaatgtcggacgcgatgaaattttcgccctgcccgatgccgatgatgagcgggctgtccttgcgtactgcgtagatacagtccgggtggtcggcactgatgatgccgagcgcatagctgccctccaccttggagatgaccttttcaatcgtctccagaatgtcgcccttatcgtagtattcgagcatctgcgcgacaacctccgtatcggtttccgatacgaactgtacgccgcggcgcatgaggtgctgcttgaggtagaggtaattctcgatgatgccgttatgcacaacggcaaaacgaccgccctcgctcacctgcgggtgcgagtttacatcgctcggtgcgccgtgcgtcgcccagcgcgtgtggccgatgccgagcgtaccggtcagtgctttgccgccgtccaacaggtcgctcagtacgcgcagccggcctttcgattttacaactttcaatccgtcttccgagaagaccgctacacctgcggagtcatatccgcggtattccaacttttccaacccctgtaagagaacgggtactgcctgatcgttaccgatataaccgacgattccgcacatatcctaaaccatcctttcagaatttacaattcaaaattggttattctctgtacagtgaaaatataactgtatttaatgatttgtatgcaaagtaggggaaagcaggcggcttggggctgcctgctttcttagaatatcttaagttagcgatacatgatgtcttcgcgggcggggccgttcgagaccatgcagaccggaacaccgaggtgcttttcggcaaactcgacgtaatgacgtgcgttctccgggagatcctcgaacttcttgatgccgcggatgtcgcatttccaacccggaagcttctcgagaatcggcttgcagcgcttgagctccgtagtggtcgggaagtaatcaatctgcttgccgtcgagctcgtagccgacgcagaccggaatctcatcgagatagccgagtgcatcaagcacggtcatggcaacgccggttgcaccctgcacctggcatccatagcgggctgcaacgaggtcgagccagccgacacgacgcggacggccggtggtggcaccgtactcgcccttatcgccgccgcgctttctcagctcttccgcttcatcgccgaaaatctcggaaacgaactcgcctgcgccgacagcgctggagtacgccttaacgaccgtgtaaatctctttgatctcatacggcgggatgccgcctgcaccgacagcgccgaagccggcgaccggggaggaggaggtgaccatcggataaatgccgaggtccgggtccttcagggagccgagctgaccttcgagcagaatggttttgccttccttaacggcgttgtggagaatggtgaatgtatcggccacatacggcgcgatgagttccttgtactccatgagctttgcgtaaatctcttcgcggtcgagcggctctaccttataaaggtcggtgtagagcacatttttgaggtcgagcacatggtcaatcttctccatcaggtcctctttgctgccaaacagctcgctgacctgaaagccgatctttgcgtacttatcggaatagaacggtgcgatgccgctcttggtggaaccaaaggacttagaagccagacgggcttcttccatgccgtccagtgctttgtggtacggcataacgatctggcagcggttggagatgaggatgttcggcatcggaacgccctgttccgttacagccttgagctcgtcgatgaagttttcaacggagagcgcaacgccgttgccgataatattgaggatgttctttctaaaaataccggagggcagctgatgcagagcaaagcgaccgtaattgttgatgatcgtgtgaccggcgttgctgccgccctggaaacgaacaacgatatcggaatcttccgccaaaatatcggtgattttgccttttccttcgtcgccccagcaggcgccgacgattgcttttaccataatagttcaagcctttctaatatatatatttatttcctcccaaagccgtttaaaacggcggggtgaattacagattgatctctgcggtctctgtttcggtgtctgcatagcgatcaaggatcggctttacgacatcgtgaaggaaaatttcggtctggcgcggtgcgcggccgacatatttgtgcgggtctacgatgcccttgagctcgtcgagcgcgacgccgaagatcgggtcgtttgcgatgcgctccagaaggtcgttttcaccgccctcttccttaatgaccttagaggccgccatggagtgcacgcgcacgtgctcgtgcagttcctgacggtctgcgccgcgctttgcggcgtccatcatgatgttttccgtcgccatgaacggcagctcgcggcggaggtgctgctcgatgaccttcgggtaaaccacaaggccgtccgcaacgttcattacaaggttcaggatcgcgtcggtcgcaaggaaagcttctggcacgctgatgcgcttgttcgcggagtcgtccagcgtgcgctcaaaccactgcgtagaagcggtaatcgccgggttcagcgcgtctacgacaatgtagcgtgcaagggaggcgatacgctcgctgcgcatcgggttgcgcttatacgccatggcggaggaaccgatctggttcttctcaaacggctcttccacttccttcaggtgctgcagaagacggatgtcgttcgagaattttgcggcgctctgcgcgatgcagctcaaaacgttcagcatctggctgtcaagcttacgcgggtaggtctgtccggagacggcaaagcagctctcatagcccattttctcggcgattttcgcgtcgatctttgcggccatttcatcgttgccgtcgaaaagctcaaggaagcttgcctgtgtgcccgtggtgcccttggagccgagcagcttcgctttgctgagctgatactccacgtcttcaaggtccatcagaaactcctgcatccacagcgtggcgcgcttgcccacggtggtcggctgtgccggctggaagtgggtgaaggcgagcgtgggcaggtctttatattcttccgcaaaatgggaaagaatgcggatgacattgacgagcttcttcctaacaatcttcatggcttccgtcatgatgatgatgtcggtgttgtcgccgacatagcagcttgttgcgccgaggtggatgatgccggcagccttcgggcactgctggccgtaggcatacacatggctcatcacgtcgtggcgcacaaggcgctcgcgctcttcggcgacttcatagttgatgtcctcggcgtgtgccttcagctcatcgacctgttcctgcgtgaccggcagaccgagctccatttcactctctgcaagggcgatccaaaggcggcgccaggtcttgaacttcatgtccggcgaaaacaggtacttcatctctttgtcggcatagcgggaggacaggggggattcatacgtatctctcatgtttatcttttcctttaatcaaataaataacaaacggagaatgcggcaataaaccgcgtaaacggagcctccgcgttttcggggactccgtttcgttatatgctttacagtcagttcaggccgatgcgcttcatcatttcggcataagcctcttccacaccgcccatgtcgcggcggaaacggtccttatcgagcttttcatgggtattgatgtcccagaagcggcaggtatccggagaaatctcgtctgcgaggataatctcgccgtcggaggtcttgccgaattcgatcttgaagtcgatgaggtcaacgccgatgctcttgaagaactccagcatgagctcgttgactttcagagccatcgagctgatcttatcaatctcctcctgcgttgcaaagccggcagcgaggatatggtaattgttgaccatcgggtcgccgagatcgtcgttcttgtagcagaactccaggaccggtacgcgcatgggggtgccttcctcaaggccgaggcgcttagagagactgccggctgccttgttgcggacgatgacttcgagcggaacgatgctgaccttgcgcacgacggtgtcgcggtcggaaagctcttctacaaagtgggtcttgatgccgtgcttttcaagcagctggaacatgaagttggacatacggttgttgacaacgcctttgccgacgatggtgccctttttgaggccgttgaacgcggtcgcgtcatctttataggaaacgatgcaataatccgggttctccgttgcgtaaactttctttgctttgccctcatagagtaattcggtcttctgcataatacattaccatacctttcttcattgagcgtttggcgcgggcgaaaagccgaaaacggcagaattttctcccgtgcattatcatacacgttaattctatagaaaagtgcaccgaatgtcaatctttttccgaaaaccgccgtgcaagaattcgtacaatttcagggtatgagacgaaagaatactggtgcttttacaacaaaagaaagtgaacttgcagaattgaaataggtttccttcaaaattcatcgctttgcggtgctgaaacttttttgaaatttttcgcaaaaacatattgaaaacacgaaaaacctgtggtaaaatgtaagcgttttcaggaaacgggcaaaaaggcccaaaagaccgaagggagatctttttgcaggatttaaaggtaaaaactgcgtttcctgtgcttttctttttttcaatctattttctaaggagcgatcgttatgtcttatgtaagcgaacagctggaacaccttaaaaagcttaattccaatgagccggaattcattcaggctgcaacggaggttctcaccactttggagccggtcattgaagcaaacccgcagtatgaggctgccggtatcttggagcgtctcaccgagccggagcgccagatcatgttccgcgtgccgtgggtcgacgataacggcaaggttcatgtgaaccgcggctaccgcgtacagttcaactctgcgatcggtccgtataagggcggtctgcgtctgcacccgtccgttaaccttggtatcatcaagttcctcggtttcgagcagattctcaagaactccctgaccggtctgcccatcggcggcggtaagggcggctccgattttgacccgaagggcaagagcgaccgcgagattatggtgttctgccagagcttcatgaccgagctttacagacacatcggcgctgatacagatgtaccggcaggcgatatcggcgtaggcggcagagaaatcggctacctctacggccagtataagagaatccgtaactgctatgagggcgttctcaccggcaagggtcttacctacggcggctccctcgcccgtacggaagcgacgggctacggcctgctgtacttcaccgatgcgatgatgaagaagaacggcatggatattaagggcaagacggttgttatctccggcgccggcaacgttgcaatttatgcaaccgaaaaggcacagcagcttggcgctaaggttgttaccatgtctgattccaccggctggatctacgacgcggagggcatcgacctcgcagctgtcaaggagatcaaggaagttaagcgcgcacgtctcaccgagtacaagaagtacagaccgaacagcgaataccacgagggtaagggcgtttggacggttccgtgcgatgtggctctgccgtgcgcaacgcagaacgagctgaacgaagaagacgcgaagacgcttgtcaagaacggcgtacaggtcgttgccgagggtgcgaacatgccgtccaccattgaggctacgaatgtcttccagcaggccggtattctgtttgcaccgggcaaggctgcaaacgcaggcggcgttgcgacttctgctcttgagatgagccagaacagcgagcgcctctcctggagctttgaagaagttgacgcaaagctgaagggcatcatggagaacatctttgcaaacgtagacgcggctgccgagaagtacggccacccgaagaattatgtcatgggcgcaaacatcgcgggcttcgtgaaggtcgcagatgctatgctcgcacagggcattgtctgatcctgatttgatttaaaacagaataaagcttaaaaggcgctgtgtggtttaaaacctgcacggcgccttttgcttattaaggaagtcattctaaacgatggaggatggaataacacaaacgaaacttatcacagcgggatgaaaaagtaaatacggaaaataaaaaaatggacaccgaaacgatgtccataattttatcgaccagtttttttatactgctcttgtaaccttgccggaacgcaagcagcgggtgcaggcgtatacacgcttcggtgtaccgttaacaagtgcctttactcgtctgatattcggtttccaagttctgttggaacgtctgtgggagtgggaaaccttgatgccgaaggatacgtcctttccgcaaatttcacatttagccatctatctgcacctccttaaagtgcctaattcttcattgcaacgttagtattgtagcagaaacgaacgcaaaatgcaagatttatttttaaaaatgggaactaaattttgaaaaaactcgcttttcgcatcttttgctaaaacgaaaagttgttcacagaatgtttttacggaaaagaattgttttttcgtcctctatgctttataattctataaggtatatccgaaaccgttttcgggtgcaccccacagaaagaggtgttatatttgctttttaattcgatcatgaccttgctgcgcggcggcgctgttgatccgctcagtgttatcattcagattttagccacgctcgtcatcgttttccttgcgctgccgctgcacgagcttgcgcacggttgggtggcgtacaaactcggtgaccctaccgcaaagtatgagggccgcttgacgctgaacccgcttgcaagcattgacccgatgggtgcgatgttccttttgcttttcggcatcggttgggcaaagcccgtgccgatcgacagccggtattttaaaaatccgcgctccggcgtggcactcacgtctcttgcgggcccggcggcgaacctgcttgcatcttatgtcggctgcgttatttattatgctattgcggcttttgcgccgtacaacgcgtttgtgcattacattttactgttcttcagctatttttcgtttatcaacgcggtgctggcggtcttcaaccttgtgccgctgccgccgcttgacggctccaaaattctggcggcgctgctcagcgaccgcgcacgctacaagttctaccagtaccagaacatgctctccatgatcggcatgctgctcattgtttccggtgcgctcacgggtccgctaaatgtgcttgaaaacgccgtatacggcggtgtgagctggcttgcggcgttgccgttccgtctggccggcgtattgtgatcgtgtatgaacatggaaaaaacggaaacactttcctataagctcgatgtgtttgagggtccgctcgacctgctgctcaacctcatcgcaaaaaacaaactcaatatctacgatattcccatcgcagagcttttagagcagtacatggcgcagattcacgagatgcaggcggcagatatggacgttgcgagcgaatttcttgagatggcggcgcgtcttgtgcacatcaaaagtgtttcgctgctgccgaaaaaggaagaggaagcggcattgaagcaagagctgaccggtcagctgcttgaataccagcagtgcaaggaagcggccatgcgtctgcgcgagcggttttcgctcgacagcatcgtgcgtgcgcaggcggatattcccgcagatctcacctataagcgccatcataagccgcaggagctgctttcggcgtatttgtcgatgctcggaaaaaagaagccgccggagccgcagaagccggaggacaccatctcaaagctcatcacgcgccgtgtggtctccgtggcttcgcaaattgttttcgtgctgcgcagcctgtggaaaaagcggcatgtgtcgttaaaagagttgttccgcggcaaaaacgacccttcggagcgcgtggcggcgttcctcgccgttttggagcttgtcaaggacaagcgattgcgcgtggacggtgacggcgaagactgcgagatcaaactgacgaacggaggcgagtaagctgaataaaaagaaaatgctcggcatgatggaggcaatcttattcgcgtgcggcgacccgatcgacatcgataagctggcgcaggcgcttaataccgaggaagagaacgttctggagctcagccgaacgcttcaggcgaaatataacaaggaagaaagcggcatccatttgctgcaattagaccacacattgcagtttgccgtgaatcccgtgtttttggcaccggtgcgcacagcgttagacctcagaagcagcgcgccgctctcgcaggcggccatggaggtgctggcggtcatcgcatataatcagcctgtcacaaaagcgtttgtggagcaggtgcgcggcgtggattgctcgggcgtcatcggcagtctggtgcagaaagcgctcattgaagagcgcgggcgacttgaccttcccggtaagccgctattatacggcacgacggaaaatttcctgcgctgcatgggcatccgctcgcttttggagctgccgcctttgccgcaggaggaagaaaccgaaaacgcacctcaaaacgacggggcagacaaagcatgatcgttttatggattctgctcgggctcatcgcgctgatctttcttctgctgtgcatccctgtgcggttcgatctgaactataacggagagacgaccgtttttatacggtatctctttttaaaataccgcgtgcttcccgcaccggagaaaaaaccggagtcgaaaaaagagaagaaaccgagcgaaaaagagtctgaagaaaaagccaaggagaaaaagccgaacccgcttttgcggcaggtgaaaaaatataaggaagccgagggacttacgggacttttaacgctcgcgaaagatttgttaaaggccaccggtacgcgcttcggaaagcttttaaagcacataaagctgaaagatttcgacctatacgtgctcgtcggcggcgggaaagatgccgccgaaattgctatcctgtacggagaggtgtgtgcgggcgtgtacccggctgtgtcggtcttgctcggcttaacaaactgcaagtcgccgcatggatgtgtttccgtcgatctcgattacagcgtaaaggaaccgaaggttttatgtacggcaagcggcgcggtgcgtccgctgttcgtcgtgcatcacggtgtgcagtttatactgcgcacgatattgccgttttacaataaatttcaaagtgccggaaagcctgccgtaaaatccgcagcgccggcagcaaataaaaaggagagaacaacatgagtgaaaataaggtcaacaacctgctcggcgtttccatggataaaatcaaggaaatggtggacgtgaacaccgttatcggcgatcccatcaccgcgccggacggcaccacggtcatcccggtttcgcgtgtgagctacggctttgcaggcggcggctccgacctgccttctaaagcgcagccggagaagggcctctttgccggtggcagcggcgcgggcattaccattcagcctattgcgtttttggtaatctcgaacggcaatgtgcgcattttgcagattgagccgtatgtttcgtctgtcgatcgtgttgtggcgagtgtgccggatgtagtggacaagatcgccggacttttcaacaaggataagaaagacaaagaggacgaggatatttccctgcccccgcagtattgattgtataatccagccgcctgccgcgtatacatgccgtggcaggtggtgatttttgcgaaagatactttgtgttttgctggcggtcgtttttgtgtggggcagtctgccggtttcggcagagacggcggagtccgtaagcgtttcggcgtatgccgccgtactgtatgagcccgtgagcggcacggtcttatttgaaaagaacagccgcgaggtactgcccgttgcgagcacgacgaagatcatgacggcgctgttggcatttgaaagtgagcataggggtgatcccgtgacaatcacgccggaaatgataagcgtggagggctcctctatggggctgcgcgccggggaggtgcttgcactcggcgacatcgcccgcggcatgatgatggcctccggcaacgatggtgcgaatgcgatagcgctgtatctgtccgattcggcggaagcattttccgagaagatgaacgcgcgtgccgcagagcttcatatgatgcagacgcatttcgtcacgccctcggggctcgatgccgaggggcacggctccacggcgtatgacatggcgctgcttgccgcggaagcgatgcaaaatgaagagtttgccgccgcggtggggcagacgacgctttccgtgccgtttatttcgcccgaaaaaaccgtgcgatatgaaaatcacaatcgtttactaaagctgtacccggactgtacgggcatcaaaacgggctttacgaaaaaggccgggcgctgccttgtgtcttccgcagagcgggacggcgcacggctcatttgtgtgacattaaatgccccggacgactggaacgaccacatgaatttgtacgattacggctttgcacagcttgcagagcgaacatatacggcggattttcagccggtttcgcttcccgctgtcggcggtgaaaaagagtgcataagtctcacgctccaaacgcaggaaagcgccgttttgccgaaagatgtgacggtcacggcggggtgcattctgccgcgatttgtgtatgcgccggtagaaaaaggcgacgtaatcggctgcgtgcgatacagcgtgaacggcaaggttctaaaggaaacaccgcttgtttcaagcgaagattgtgctttgcaaaaggacgaacgcacgtggtttcaaaagtggtttgcccgctttttgagaagcacaagctttataaattgagagatacagagaaaggttttgaactatggctaaagatacaagactgcaaaagatgcttgcggagtgcggcatcgcttcgcgccgcaaggcagaggagatgatcgcggcggggcgcgttgcggtcaacggcgtccgcgcgcagatcggcgacaaggtggacgtgaagaaagacaaggttaccgtagacggtcagcgcgtgcagaccgtggacgaaaagatgtacataatggtgcataagccgcgcggctatttgacctccatgtccgacgaccgcggcagaaagtgcgtcagcgagcttgtggaggagctgcctgtgagattattccccatcggccgtctcgataaagactccgagggcttgctgctcatgacaaacgacggcgattttgcaaatctcatcgcgcacccgtctacacatgtgccgaaggtgtaccgtgttacggtgcgccccggcgtaacggaagaacagctgacgcgccttgcggtcggtgtggaaatcgacggcagaatgaccgccccggcttccgtgcgtgttttggagcagcagcccggccgcgtggtgctggaattcgtgctgcatgagggccgcaaccgccagatccgcaacatgtgtgaagcagtgggccttgaagtggccagactgaagcgcacggccatcggcgcggtgaagctcggcatgctgccgcaggggcgcttccgtgatctgaccccggacgaagtgcgcagattacgcgccgccgcacagaaaaaaggaaacgcgcagaacacacagcgcgaggaggaaaaacaaaatgctgcaaatcgtaccaatggcggaaaaaacagaagaagccgccctgctggcaaaaacagagggcgcacccgataacggccgtgtgcttgtgatgacggatggcgaagaaacgctcggctatgtcgtcgtcgcgcttgaagacgatacgcttgtgttctacggcttttccgtctccgggcagaccgatttcacaaaagcaaagcccgaccccatgacgacttttgtgctcgatacacttatgcgctccgccgcgtcgttcggcgagacgaacggcatgaatcacatccgcaccgcattcccggatttttttgatttctttaagcagcgcgggtttacggttgcggaagatcacgccgaagcgccgatgagcctcatcgtgcattacgaataaaacccaaaatgccgcaaagcgaaacctctttatgcggtattgccacaaaattgccgcgggctgctgcctgcggtgttttgttttttccgaaaattccgattttcgcccgcgataggttgcattttccggcttaaaatggtaaaatatcttgatagaattaaagtcgggtactatgtcctctgtgaggaacacaaaatatcccgaaaaacatagacagaattttagaaaagagatgatcctatgctgaaaagcatgaccgggtacggccgctgcgaagaaaccgtcaacggcagacacattacggcggagctgaaatcggtcaaccacaagtattttgagttttctccccgtgtgacgcgcggctacggattccttgaggataagctgaaaacctacgtgcagagccgtgtggcacgcggcaagatcgatttttatttgagcattgagacactggaggacacggatgtcgtcgtcagtgtgaaccactcgcttgccgcgggttatattgcggcgttccgcgagctttccgagcgctaccatctgccggacaccgttaccgtcaattctctttcgcgctaccccgatattttttccgtgcacaaggcgccggaggatgaggaagccatttgggcagacgtgaagcaggttgctgaaaaagcggtggacgcgtttattcaaatgcgcgagacggagggacagcgtctttacgaggacgtcatgtctcgtgctgagacgattttaaacatcgtcgggcagattgaagagcgctccccggagaccgtcacggaataccgcgagcgtctggaagcaaagctgcgcgaggtactgaatgacaccacgattgacgagcagcgcattttgaccgaagccgccatttttgcggataaggtcgccgtggcggaagaaaccgtgcgtctgcgcagccatttcgatcagcttaaggcgttcttgagcgccgaagagccctccggtcgaaaaatggattttcttgtacaggaaatgaaccgcgaagcgaatacgatcggctcgaaggccagcgattccaagatcgcctacatggtggtggatatcaaggccgagattgaaaagatccgcgagcagattcagaacatcgagtaaggagcgtttattatgcagcttgtgaacatcggctttggcaacatgatttccgcagagcgcatgatcgccattgtcagcccggaatccgcgccgattaagcgcatcgtgcaggattcaagggaacgcggcgccttgatcgatgccacgtgcggcagaaaaacgcgcaccgtcatcatcatggacagtgaccatgtggtgctttccgctttgcagctggagaccgttgcaaaccgctttaacaccggcgaaaaagcagaagaccccgttgaagcggaagccccgaatgtataaataacggaaaagaaaggaatgtttccgatgaaaagaagaggactgcttgttgtcgtttcatcgccctccggcggcggcaaggggaccattttaaaagaattgttccgccgtaatgagaatcttaaaatgtccgtttccgctaccacgcgcgccccgcgcccgggggaggaacacggcgtgcactattacttcatcacaaaagacgagttcaaaacgaacatcgaaaaccatgcgatgctcgaatacgcagaatattgcgacaacttctacggcacgccgaaagcgccggttgaaaagtggcttgaggaagggcacgatgtcgtgcttgagattgaggtgcagggcggcagacagattaaaaaagtcgcgccggactgcgtgagccttttcatcctgccgccgtccttaaaggtgcttgaaaagcgtctgcgcggcagaggcaccgaaacagaagaagttatagagaagcgcctcgctgccgcggcagacgagattcgctgcgtaaaagattacgattacgccgtcatcaacgacacggtcgaacaggccgtgcttgatatagaagccattttagccgcggagaagctgcgtgtttcccgcgaaaaagatatagcagaaaggatcctgaaccatgcttaaaccgtcctgtaacatcattaaaaccccgcacaagagctattattccgttgtcatcgccgttgcaaagcgcgcaagagaaattacacaggaagcggaagacaacaatgaaatcatcgttgaaaagccggttgatctggccgtgcaggacttcgtcgatgagaagtataagatcatcgagccggacgagattgacggctaatttaccgtaaagggagtttttgctttgctggcgcagttggccttggagaataccacatatcggtttgataagccgtttacgtatagtgtgccgcaggcattggaaacggcggtacgtccgggtgtacgcgttactgtgccgttcggcgcaggcaaccgcacgcgcgttgccatggtgctctctacgtcgtatgaaagcggcgcagggcaaaagctgaaagccattgcgtctgttttggacaaagagccgctcttggatgacgaaatgctggcgctcatcccatggatgaaaagccgctgcttctgcacactgtacgatgccgtaaaggtcatgattcccgccggcatcggctataagctcgtaaaccgctatcgcatgaatgccgcgttcaaaaactatgaccgcgaagcgttcacggataccgcgtggcagattatcgtggcgctgacggcggcaaaaaacggacttaccggcgcagaactcaccgaaaggctcggcatagaagaaaaaagcagcgatctgctttcgctgctcgaaaacggcacggtcatacgcgaaaacgcggcgtcccgcaatgcggcggatgccactacgcgcatggtctgtgccgtgccggatttttccggcaagctgactccgaagcagcaaagcgcgttcgatacgctgtgcgccatcggcactgtaaccgtgcgcgagctgagctactataccggcgtgagtgtgggtatcatccgcacgcttgccgataagggcgcagcggagatttttgaagtcgagcgcttccgacgcccaaagcaggaaatggcagacatcagactgccgcagacgctttcggcagagcagatgaatgtggcaaaggacattctgcgcgaatgcgatgcggcagaaccgatggtcggtctgctctacggtgtgacgggctccggtaaaaccgccgtgttcctgcatgtcattcgccatgtgcttacggttggcaagggcgtcatcgtcacggtgccggagatttctcttaccccgcagacgcttgccgtgtttacggcggcgttcggcgataccgttgcggttttccacagcgggctttccgttggcgagcgcatggatgagtggaagcgcgtgcgcaccggcagggcgaaaattgtcgtcggcacgcgttctgccgtgttcgcgcctgtgcagaatctcgggctcatcgtcatggacgaggagcaggagagtacgtataaatcggagagcacgccgcgctaccacgcacgggatatcgcgaagtttcgcgtaaattataaccgcgcttactgccttttgtgctccgctacaccgtctgttgagtcttactacatggcgcaaagcggcaagtaccgctaccacgcgctgcaccaccgctacggcgatgctgttgtgcccacggtgcagcttgtcgatatgaacaacgaagatctctaccgcggcaagccgatgatcagtatggcgctggcgcgtgcggtctccgaaaatatccgcgcgggcaggcagtccattttgctgctcaaccgccgcggctaccatacgtatgccgtgtgcaaggactgcaaaacggtcgccgcgtgcccgaactgctccatttccatgacataccacgcggcgaataaccgcctgatgtgccactactgcggccattccgaacctgcttacgtgcgctgtaaggcgtgcggcggtgagctgaccttttccggcggcggcacgcagaaggcggaggatcagctgcgggaggcgttcccggaggcgcgcattctgcgcgtggataccgataccactgcgaacaaatacgcacttgaaaagaagctcaacgcatttgcaaacggcgagtatgacatcatgatcggcacgcagatggttgcaaaggggcttgatttcgagaacgtcacgcttgtcggcgtactttcggcagatcagtccttatacagcgatgattaccgcagcaacgagcgcacattcgacttgcttacacaggtcgtggggcgtgcggggcgcgggcgctaccgcggcatggcgctcattcaaacgcatgtgccggaaaacccgtacctgcaccttgccgccgcgcaggattacgaaagcttttttgaaacggaaattcgtttcagaagggccatgctgtacccgccgtttgcggatcttttgcaaatcggctttgtgggcgaaaaggaagacaccgtgcgtgcggcagcggagcatttctccgcgctgcttgcagagacgttccgccgggactatcccaacttgccgctgcgtttattacgcgcctctgcggcatccgtgtcgcgtatgggcggcaaataccgatataagattatcatgaaatacaagaattccaaggcatttcgggatgccatcgcgtctcttttaggcgttttttcaagcgataagcgctttttgagcgtcaccgcgtatgcagacccgaaccccgacgcgattttgtaacagaaatttgaattcacaggaaaggagtgccgcaaatggcgcttagaaatattgtgaaaaagggcgacgacgtgctgaccaaaatgtgccgcccggtcgaaaaattcgacgagaagctttgtacgctgcttgacgatatgtacgagacgatggaggacgcaaacggcgtcggccttgctgcaccgcaggtcggtttgctgcgccgtatcgtcgttatcgatgtcggcgagggccgcattgagcttatcaacccggaaatcatcaaaacctccggcgagcaggacggcgcagagggctgcctctcgttcccgggtgagtttggcatggtcaagcgccctatgaacgtcaccgtccgcgcacaggacagaaacggtaaaacgtttgaaatcagcggcacagagctgctggcccgcgcgttctgccatgaaattgaccacctgaacggcgtatgctttgtcacgcgcgccagccgcatgctggagccggacgagttggaaagctaagacagaatttagagaaaaaggaggaatttccatgcgcatcgtattcatgggcacaccggattttgccgtaccgagcctcaacgcgcttctggagcgcggccatgagattttggcggtctatacccagccggataagccgaagggcagggggcacaagctgctgccgccgcccgtaaaagaaacggcaatggcacacaatattgaagtgcgccagccgacgacatttaaaaataatgaagacgaaatagcgtatttgaaggcgcttgtgccggagctcatcgttgttgcggcgtatggaaagattctgccgccgcgtgtgctgaacatcccgccgtgtgggtgcatcaacgtgcacggctctttgctgccgaagtaccgcggcgccgcgccgatccagtgggcggtgctgaacggcgataaaatcaccggtgtgaccatcatgcagatggcagatggcatagacaccggcgacatgctggcgaaagcggaaacgcctattggtgaagacgagactgcaggcgagcttttcgaccgcctgatggtgctcggtgctgagctactcgtcgataccattgataagctcgacaccatcaccccgcagccgcagaacgatgcggaagcaatccacgcgccgatgatccgtaaggagatgggcgcaatcgattggacacagcccgccgagcgcgttcacgaccttgtgcgcggtttgaacccgtggccgtccgcgtttttcacgatagagggcaagcgcatgaagctgcacaggacgaaagtcgttgtcggcaaaggcgaaccgggagaaattgcggtgatcggcggcgaaatggctgtttgctgcggcgaaaatgccgtgcagctcatggaaattcagccggaaaacggtaagcgtatgcgcggcagcgattatctgcgcggtcacgcgatagaagcaaaggcgaaggttcaataatatggcgacttcttcccgaaaaacggcgcttacggcgctttccgaggtgacggaaaacgagggctactcgaacatcgtcatcgataaagccattcgcgcggcggagctttctccgcgcgacgcggcgctgacctccaccattttctatggcgttttggaaaagcgtctgacgctcgatttttatattcgcaagttcctcgcaaaaccgaagcagaagctggacggcacggtgctcaacatcttgcgtatcgccgtgtaccaaatgatgtaccttgaccgtgtgccggattccgccgccgtgaacgaagccgttttgtgcgcggcagaatatcggcgcgggcagtataaaaacttcgtgaacggtgtgctgcgcagctttgcgcgcggttggcatgaggtaataattcccgaagatgacctcagcgttcgctataacattccgcagccgatcatcgagagctttaaaaaggattacggcgagaccgtttgcatagatttgttaaaggctatgtccgaacgggcggaaacgtatatccgcataaatccgctaaagaccacggcggacgatttgatacaatcgctgccggaaaacaccgcggagaaagcggtgctccaaaacgccctttgcgtgcacggcacgggcgatgttaccggtttgccgggctttgcggaaggcaaattccatgtgcaggatctttcttcgcagcttttgtgtgcgtttgtttcaccgcaacccggagagcggcttgcggatgtctgtgcagcgccgggcggcaagagcttcacgcttgcggaatacatggaaaacacaggcgtgctcgatgcgttcgatttatacaaaggtcgcgtgaacctcatcaaaaaaggcgcggagagattaggcttgagcatcattcacgccgccgtgcgcgatgccgcgaccggtgtgtgtgaaaagcagtacgaccgcgtgctgtgcgatgtgccatgctccggactcggggttattcgacgcaagccggaaatccgctacaaaaagcaggagagctttaaagagttgcctgcgttgcagctcaaaattttggagcattccgcacaacttgtacgtccgggcggtatgctgttttattccacgtgcacgttgcgcaatgcggaaaacggcgcggtggtgaccgagtttttaaagcgccacccggagtttgaaccgtatgatctgcccgaaacggagggcatctcccacatggtgaacgaaccgaaattcatgcgcaccatgatgcctatggaccacggcggagacggctttttcgccgctgccatgcgcagaaaaacagaaacagggaaggagacgaagcgttgaccgatataaaatccatgctgctttcggagctgcaggaggactttgccttgcgcggcttgcaaaaattccgcgcagcgcaggtataccgctggctgcatcagcgcggcgcgacctcgtttgacgagatgacggacctttccaaagacctgcgcgttgctttaaaagaaagcttcgaaatacgaaatacggagatcgccattcggcgcgtttccaaaatagacggcactaaaaagtatcttttccgcttgaacgacggtgagatgattgaatccgtcctcatgaaatataaacacggctactccatttgcatttccacacaggtaggctgcaaaatgggctgcacgttctgtgccacgggcaaaagcggtttttcgcgcgatcttttgccgagtgagatgatttcggaaatccaaacggcgcagaaggacatcggcgagcgcatctcgaatgtcgttttgatgggcatgggtgagccgctcgacaattataagaatgttttaagatttttggagcttgtttcgtcagaaaacgggcttaatataggtatgcggcatatttcgctttcaacttgcgggcttgtcgaaaaaatttacgaccttgccgaccgcaaattgcagctgacgctttccgtttcgctgcatgcgccgaacgacgagatcagaagccgcaccatgccggtcaaccgcaagtggaacgtggagcagctcttaaaagcctgccgctattattccgacgtaacgggccgtcgcatctcctttgaatacgccatgatcagcggtgtgaacgacagcgatgcctgcgcaaacgagcttgcatcccgcctgcgcggcatcatcgcccacgtgaacctcattccggtaaatgacgtcaccggcacgggctaccgcaaaagcggggaggagagactcagaaaatttacggcgatcctcgaaaaacggggcatcaccgctaccgtccggcgcacgctcggatcggatatagaagcgtcctgcggacagctccgtcgacgcaatgaacagggaggtacagtctaatgtacgcggtatgcaaaacggatatcggacaggtgcgcagctctaaccaggacatctgccgctgtggcactttttcggacggcagcgcgtggaccgtggtttgcgacggcatgggcggcgtaaacggcggcaacattgcaagcagtgttgcctgcgacgccatctgcaaagcgatcacggaaaactacacgccggatatggaagaagacgcagtgcgcgacatgatgctgcatgcaatcaatgacgcgaacgcggcggtgctgcaccgcgcgcaggaagacccggccttaaacggtatgggcaccacggtcgtcgtcagcattgcggcgggcggcgtgctgcacattgcccacgcaggcgacagccgctgctacttaaagacggcgcttggcgtaaaacaggttacgaccgaccattcctttgtgcagcagcttgtggaaagcggtgccatcacggaggacgaagcgcgtgtgcacccgcagcgcaacctcatcacgcgcgttgtgggcgtgcaccccgaggtggagtgcgattacggctgctacaaattcgagcccggcgatctggcgctttcctgcacagacggcctgagcaattacttagagcgcgacacgctgctgcttttcatcagcaactatcagggagaagaactcgccgatgagctgatccgctatgcaaacagcaagggcggcagcgataatgtgaccgtcgcggtgatcgagaaccgctgagaaaggatgaaaaagaatggataaatatattggtaaacgtttagacggccgctatgagatccacgagcttctcggcgtaggcggcatggcgtatgtgtataaggcgtatgacaatattgaaaagcgttgggttgccattaaaattttaaaggaagagcttgcgggcaacagcgattttctgcgtcgcttccgcaatgaatcgaaagccattgcggtgctttcgcacccgaatatcgtcaaggtctatgatgtcagctttggtgaccgcattcagtacatcgtcatggagtatatcgatggcatcaccttgaagcagtatattgagcagcagggcgagatcaaatggagagaggcgctgtactttacggtgcaaatcctccgcgctttgcagcacgcccacgaaaaaggcatcattcacagagacatcaagccgcagaacatcatgctgctcgaggacggcaccattaaggtgacggatttcggcatcgcacgcttctcgcaggcagaaacgcagaccatgaccgacaaggccatcggctctgtgcattatatcgcgccggagcaggcgcgcggcggttatatcaacgataaggccgatatttattccgtgggcgtcatgctgtatgaaatgctcacgggtcagctgccgttcgttgcggataacgcggtttccgtcgctatcatgcagatgcaggcagagcccacaccgccctcgcgcatcaacccgtccattccgaagggcctcgaagagattacgatgcacgccatggagaaaaacccggcgcagcgcttcccctcggcagcggatatgctggaggacgtggagcgcttccgccgcaacccggaaattgtgttccgctacggcgagcaggttgaccgcgcgtatgcgggcacctctgcggatatttacggcaacgtgcagcagaacgcagcgccgcagaagtataacgacaactacgagtatgaagaagaatatgtgcgttccaaaaacggcgcgcgcgcttccaacatcatcaagggcatcgtggcggctgtcattgttgtagcccttgtggtaggaggcattttcggttggcggtatcttcagaatctgacggcctccacaaacaagacctctgatgagatcgtcctgccaaactttgtcgggaagatttatgcgtccgatattgaggggaacagtgaatatgcggacctcacgtttgagatcacctacggcaacgtgcccagcaagcagccgggcgaggtgctgcgccaagccccggcggccggcatgaccgtaaaaaagggcaagaccgtttcgctcaccgtcaacggcgaggccgagcaggtcgttgtggaagacgtgaagggctataagcagcaggatgcgtatgacgcgctgaaggccctgaacctttcgccgaagattcaggcagtcgccgatgacgacaccgcagtcggttacgtcgtcaagaccgacccggcggcaggctctaccgtttctaccggcaccacggtcacaatctacgtcagctccggcccgtctacggaaagcgccgtgatcccgaacatcgtcggctaccagtacagcgccgcgaaagaggagctggaagccgcaggctttgtggtcacagcagaatacgacgacgagagtgacaaggacgaaaacaccgtgctttccgtttccccgaacgagggcgaaaaggcgaagaagggctcggtcgtcaccgtaacggtcagctccggcaagggcgcacagaaagatgtctattacgatattccgctgcccggcggtgtatcggatgatcttacgatgaagatctacgtggacggtacgctcattgagacgcgcacggtgaacccctcgacttctccgtactccaacatgacgttcacgggcaaagaccgcgcgaaccttgtcatcacgctgaacgaccagcagtatatcacggcggagattgattacaccacgcagagcatcaacgtgacctcgcagcagtcgtatgcaacgccggagccggaaccgaccccgacgccggacaacggcggtgacatgagtgaatccgacggctcggtcacggcgcacgaagattaatatgggcgaaatgaaagaagggctggtcatcaagggcatcggcgggttctactacgtgcattgcggcgatgtgttgcacgcctgccgcgcaagaggcaagttccgtaaagataaaatttcgccgtatgccggcgaccgcgtccgcattgaagtggacgcgaacgatgagggttacgtgcaggagattttgccgcgcaaaaactttcttgtgcgcccgccgcttgcaaacctcgataagctgtttgtcgtgtcttccgtctgcgacccacagcccagcaccctcatcatcgataaaaccatcgccgcggcggagctaaagggcatcgagcctgtgctcgtgttcacaaagaccgacctaagcgatacgacggagctgaaagacatttacggcagcatcggcattcggtgctacttcgtctcggcggcggacggcgtgggcgtggatgacctgcgcccggagcttacgggctgcatctccgcatttacgggtaactccggcgtgggcaaatccacgcttttgaacctgcttgtgccggagctggagcttgcgacgggtgagaccagcaaaaagctcggccgcggccgccacaccacgcgtcacgtggagctgtaccccgtggagggcggctatgtggccgatacgcccggcttttccaccatggatattgagcgctacgagctgttccgcaaggaggagctgccggagggattcagggagtttgcgccgtacctcggcgaatgtaaatttacctcctgctcgcatacctgcgaaaaaggctgcgcggtattgaaggctgtggaagagggaaaaatttcccgctcccgcatagacagttacattgcaatgtataacgaagtgaaggacataaaggaatggcagttatcaaagacaaaaaatgtatgatcatcggcgcggctccgctggcgtccggcgccgtttttgaagaattcgatccgaaagagcactacgtcatctgtgcggatgcgggctacgacaccgctgtgcagtacggcgttcgccccgaccttgtcatcggcgattttgattccgccgcaaagcgtccgccggagacgatccgcaccattaagctccccgttgaaaaggacgttaccgatatgatgggcgccgtcatggtggggcagaagctcggctacaagacatttgtgcttatcggcggcctcggcggcgaccgcttcgatcactccatggcgaacctcgatgtgcttttgtatatctccaagcgcggcggcagcgcggtgctgtgtacggaagacaccaaagtgttcgttgtgcgctgtgggcgcattgtgctgacggagctgaaaggcgccacggtctccgtgttcccgtttgacggctcttcctgcaacctgacgtatgagggtcttcagtatccgctggagaaaaaagacctctctgcgggttcgtctttaatgggcgtgagcaactgcatcatctccgaccgtgcggaaattcgcgtgaacatcggctgtgcgctcgtcattgtctacacgccgaaggatatgccggcagaaccgccgcaaagcgagattcaaagccgcctgcccgaaacggaagacaaaaaagataccgaaaaataatccgtaaccaaatgatgcacctccgtatatactggaatgaccccgtaagggagcttcggtaaacggaggtgcttttctatgcgaatgccgaaatgctgcaataacccatgctttcgggaccgaaaactgcgcgcactgtgcgccgtttcattcggactcggcatggtgcttgcacagatctccccggaggggctcgtgctgttcatcgccgccgtgattcttgtcgcactcggcgtagcggtgctgcgcacattatgatctcggaaaggaacggtattttatgaaggtcgtcatcgtcaacggcaaagggttcatcggcttcatgctgcggcatatgttcggcatcagaaagctgccgcaagagacataacacaaaactgcacataacaaaaaggctcactgcgggggaacagtgagccttttgcgtattacgttatgattgaatttaggaaagcttagatcacgttatattccttgagcagcttttcaatgtccgtatgctcaattttcttcagcgcttctttcagaacaaggcgctcgatgaggccgaggtccatatcggtcactttcttgccgtcgcggagtttaacggtggcatcaagtagtgcgcgtaaatcgtatacgctgccccagacctccggcacgccacggtctacgttcagcagcgtgtatacggcctccatgccggtacgcatggagtattccgtcgtgaaaatggtgtcgcgcttcgtttcggcgaactgaccgaggaacgcgaagttcacagcgcccgcaggcacaacgtccgggcggtcgccgtatgcgcgaggcatgaagaatgcggtgatatacggcatcatgcacggcacggtgttggcgctcgtctccgcaagatcttcaatctgatcctccggtacaccgatgtgatacagccattccatgcagatctccttgccggtgcactcgcgcatcggctttttgacgtaatcgccgggcttgtcggagaacaggccatagacccacacaaggcagtgacccttcggctgtgctttgaactgcggctggcggttgatggtccagcttaaaagccaggaggagtcctttacggaaacaatgccgccggtgacgaccttgccggtgaacgggtcgcgcttgcagatgttcttgatatacggaatgatgcggtcgtcgagcgtctcaacggtggcgctcatccagttcgtctgctcaggatcgctgcagaacttatccgggtgaccgaaagaggggtcctgcgcggcaattttgcgccacatatcccagccgccgctctcgcggatttcggtattgaacttagccggcgtgttctggtcaccgatagaggaattctccacgcagccgccgttcgtgatgaacacaaggtcgttttcggtgaggtcgatgtgctcttccttgccgtcgcgcagcgtgtcgatgcgcgttgcaagcttgcgctgttcgttacagtcaaactcgacgtttgtgaccttcacgccgaagtgaaactgcacgccgtagctttcaaggtacttcaccatcggcagaatcatggattcatactggttgtactttgtaaagcgcagtgccttgaaatccggcagaccgccgatgtggtggataaagcgctggatgtacagcttcatctcgagtgcggagtgccagttttcaaaggcgaacatcgtgcgccagtagagccagaagttggagttcagcacctcgtcgtcgaatacgtccgtaatgcgcttgttctgtaaatcttcgttcggcgtgaagaacagcttcatgatctccatagcgcccttatcggaaatatcaaacttaccgtccgtgtaggcgtcctcgccgcggttcacggtcgcgcggcacagggagtagttcgggtcttctttgttaagccagtaatattcgtccaaaacggaaacgccctcggtctcaatggacggaatggaacggaacaggtcccacatgacttcaaagtggttgtccatttcacggccgccgcgcatcacatagccgacgttttcaaatttccagccgtcgcatgcgccgcccgcgagctgctctttttcgaggatgtgcacatgctcgcctttcatctggccgtcgcgcaccaggtagcacgctgctgtaagggctgccagaccgctgccgacgatatacgccgatttttggtctacgccctccggcttcttcggtcttgcaaatgcttcatagttgccgcttgcataatacatataaaaaacctcctaaagtgtttcttttgtttttgtgcctacatcttatcatgtctttttgtatagaacaatatacagaaaagccgccgtgttcagtttttaaacacggcggcaaatgcgtataaatttttatcacgaacggcgttttgataaaaaagggcagcgccatattctcaaacagcgctgcccgtatgattccaaatttaagcgtttctgtaccgttccagcgcggcagaaacactgccgtgtattgcaacggaaaggtcggcgacgattatatttgggtcatccttcatgtcgtgcttgatccagtccaacacaagccccacaaaggcatatttatagaaatttgcaaggaatttcttgtcttcgtcgcgcacgttcatgcctttggctttttcgtttatcacgtgtataagaagatcataggtgatgcggtacaggtagttttccaccttttcacggctgatggaacggtaaacattcatgataaacggcttgtttgcgttcaaatcttcaaaaatgcgcaggtagccttgctgccaagtatcgtagtcctttttgccctccaaaatgcgactggcttcttcctcaaatgcccattcaatgaggtcgtaaatatccttaaagtgatagtaaaacgtcatgcggctgatgccgcagtcatctgtaatatcgctgatggtgactttatcgagcggctttttaagcaactgatttttaagcgaagcgacaagcgcacgctttgtgacctgagacatagtaaacctccggcagttttttctttcttctacacgaatataccacgaaaggtccttaatttcaaggaacagactgtgaactttccgtttaaaggggcggtcatattgtccgctttccgctcatacaatgtagcgaaacaaagggcagcgaaaggaaggttacagagcttatgcggatggaaacaaacacagagcgctatgagggctttgaacagatttttgacggcgtgcaggagtgccccgtagatacggaatacaccctgccggattactgtgcggatatccagaagattttaaaatgtatcgtcacgccggaggtcacgtccgtttcggcggcaggggacagccttacgatcgacggctgcgcttccatgcatgttttatatcttgatgcaaaaggcggctgcgtgcgcgggttcgatacgaaaaaggagttcacctgttcggtgcggctgcgtgcacaggcggaaaacgtaacggcggaagcggagccgttcgtgcagcacatgacctgccgcgccatgaacgcccgcagggtcgatctgcacatcactttgggactttccgtgcgtgcttacgccgtgcggcagcttgaaattgcagactgcatttcggatgaccgtgtggaaacaaagtgcgaagaatacgatgttacccgcgccgtgggctgcgtgatgcacgcgtttattttggagcagaatgcagagctgccaaacggcaagtcgcctattgagaccgttttgcgctgcagtgtgcggtatcagatcgatacggtgcagccacaggcgggcggcgcggtcgtcacgggaaaggcgtgtgtggaaatcttataccgcacgttttccgataccgccatgccggagcgcttttcgtgcatattgccgtttacgcagacagtggagtgcgccggcgcgggggaggactgtaccatacaaatctccgtgcttggcggcgaatgcaccgtgcagccgcgtgaggacagcgtgggcgaatataccgtgctgaatctttacctaaagcccacattctgcgtgcagtttacaaagtcgtgtaccgtgcgcaccgtgtgcgacgcgtattccataaagggcgcgtgggcggcgaaatacaagaatctctcactggagcgctgtgaggtgctgccgccgcgcagcgtgcgcgtgaaggagaacgtactcgttcccgaaaacgacctcgagcaggtgctcgacatttggtgtgagggcctcacgctgacggcgtttaccgaaaaagaaaacgccgctgtgcgcggcaaattcaccgtgtgccttttataccgcacgaaagagaagcagattgcctacacggagcgtatgctcgatttcaccgatgtccataccgcagaaatcgtcggacgccgcagtgtgcgcggcgagattacatctgtgcagtatgtcattacggacagcagcacggtggagtgcaccgcagagctgcgcatggaagaacaggtgcgcgtggtatacgccgcgcggtcactcgaaagcgcggagctcgatgagaccaccgagccggagccctgctgcgcggcggtgtattacgcttcaagcggcgaaaaggtctgggacatcgcaaaacgctaccacgcccgcgtcagcgccatccgcacgcataacgactgtatggaagacgttttgagcgaagaccgccctgtgatcatctgccgaaaataagacagcggaaaggatatggctatggaagcattcagcgtatataaagatatgcagtcgcgcacgaacggcgaaatttacatcggcgtcgtcggcccggtgcgcacgggcaaatcgaccttcatcaagaaatttatggatacgacggtcatcccgaacatcgaagatgaggccgcgcgcgaccgtgccgtcgacgagctgccgcagtccgcctcgggccgaaccatcatgacgaccgagccgaagtttatccccgaacaggccgtcaccgtaaaaatggatgatacggcggagtttaaggtgcggctcatcgactgcgtgggcttcatcgtgccgagcgccctcgggtacatagaagaggagcagccgcgcatggtgcgcacaccgtggtttgaggatcccatcccgttcaatatggcggcggagatcggtacgcagaaggtgatcacggagcattcgaccatcgggcttgtcatcacgacggacggaagcatcagcgacataccgcgcgaggaatacgaggaagcggaagcgcgtgtcattgcagaattaaagtccacgaaccgcccgtacattgtgcttttaaactgcgtttacccgaatacgaacgaagcccgtgcgcttgcaagcgagctttccgagcgttataacgtgcccgttctgcccgtgaactgcatggacatcacggagcaggacattcagggcattttggggaaacttttatatcagttccccgtgcgggaaattcgactcgacattcccggctggatcatcgaccttgacgatgaccactggctcaaaaaagagattttcgataccctgaaaggcgcatgcgatatccatagagtctgcgaggtgcagcaggtctcgggtagtctcgccgcatgcgaggacctcaaaaccgtccgctgcgcgcgcatggatctcggcagcggcgcgtgcgtgctggagcttacccccatgccgtcgctgtttttcaaaattctcggcgaaaagaccggcatggaggtcgcagacgaaaccgccctgctcacaaagctcatcgagatgaacgagattaaaaagaaattcgcaaagctgcaaagcgcctacgacgacgtgatgcagacgggttacggcatcgtcatgcccgatatggaggagctgacgctcgaggagccggaaatcatcaagcagaacggcaagttcggcattcgcctgaaagcggccgcaccgtccatccatatgatgcgcacatgcatccgcacggaggttacgcccatcgtcggctcggagcagcagtccgaagatcttgtgctgtacttgctgaaagaatttgaggaaaatccgtcgcagatctggggctccaacattttcggcaaatcgctgcatgagcttgtgaacgagggcatgcacaataagctcgcccgaatgccggaggatgcgcgcggcaaggtgcgagagaccattgagcgcatcatcaacgatggctgcaacgggcttatctgcatcattttgtagcggagggaaccatgcagttttacgaaacgcccacaccaaacgacgaggaaaagccgtccgagccgatacctgccgaaacagaagcgcaagtgccgaagggcagagccgccgcaaagaaagccataagcggcggcttttgccttaccgtgttccaaacgcttgtatgcgtgcttattttgcttgcggcgtttttcctgcgcggctttctgccggagctatacggcgagctgcgtgccatatacgatgcggagctgaatcgctctgtttcgattttgcaggatgacgttccgtattcataatacggtactcacgctgcgcttcggcttttttgcggtgctggccgtgctgctcacattagacggcggtgtgcatgtgctgcccgcgcttttggcggtggcggtgcatgagacagggcacattctggcagcaaagctgtgcggcatgcagatcaaatcggtcacgttcggcgcactcggcattcacatggcaggggagacggcaagcgtcggcgattttcgtcgcgccgtcgtgtcgcttgcggggccgtttgcaaatctacttagcttcctgctgcttttgccgctgccgcgcgcctatcctgccgtgcagctcacgctgttcgcgttccacgtgctgcccgccgtaccgttggacggcggcaccgcgctttactgtctgctgcgcggcacatttagtgaaaaaacggccgagcgcacaataaccgtgtcgtccgtccttctggcgcttaccctcggcacgctcgggttttcggttttgatttctacgggctacaactttacgcttttgtttttggcggtttacatcttattttacttaattctgaaacagcgggggaacatgtgttgaaattcccccgctgttcggttataataaaatagataagttatgcaaaggtcaaaacgaaaggtaattttatgctgaataaaaaactggacaagatcctgccgaaggtgcagaagccgggacgttacgtcggcggcgagctgaattcggtcattaaaaataaaggggacgtggacgtacgctttgcgttctgctttcctgatacgtatgagatcggcatgtcatacctcggcatcaagattctgtattcgatcttcaataacgtcgattacatttggtgcgagcgcgtgtttgcgccgtggatcgacatggagcaggcgatgatcgaaaacgacattccgctctacggcttagagagcggcgaccccgtcagcgcgttcgatttcatcggctttacgctgcaatatgagctgagcttcacaaacatcctcaatatgttaaagctttccggcgtgccgcttttgagccgcgaccgcacggaactcaaaaacatcgtggtcggcggcggcccgtgcgcctgcaacccggagcccatcgcggatttctttgatattctgttcctcggtgatggcgaagaggtggatttggaggtcatcgagctgttccgcaagtgccgcaaagagggcaaaacgaagcaggaattcttaatggaagcggcgcagattgaaggcgtgtacgtgccgtcgctttacgatgtggaatacaacgaagacggcaccgtgaaagcctatatcccgcacgccggcgtgccgaagaccatccgcaagcgcgtctgcaacgatgtggacaacatgtatttcccggaaaatttcgttgtgccgtttctcgacatcgtgcacgaccgcgccgtcgttgaagtgctgcgcgggtgcattcgcggctgccgcttctgccaggcaggcttcctctatcgcccgttccgcgaaaagagtgtggagaccatcaaccggcaggcaaagcggttgtgtgaaacgaccggctacgatgaaatctctctttcctcgctcagcaccagtgattacagccgacttttcgagctgctcgacacgctgcacacgtggtcggaggacgagcgcgtcagcgtttctctgccgtccctgcgcgtcgataacttctccacggagctcatcgataaaattgcgtccgtgcgcaaaagcggcctgacgttcgcgccggaagccggcacgcagcgcatgcgtgacgtcatcaacaaaaacgtcacggaagaagagctcaaacgcaccgtgcagattgcgttcaacaacggttggtcgaaggtgaagctctatttcatgatcggcctgccgaccgagaccgatgaagacgtcatgggcattccgggcctcggtcagaaggtcgtcgattggtattacgagacggaaaaccgtcagaagggaagaaaggtcgccgttacggtcagcgccgcggcattcgtaccgaagccgttcacaccgttccagtggttcgggcaggataccatcgaaatgctcgagagaaagcaaaagctcctgcgcgagtccacattctcccgtaagcttacagtcaactaccacggcgcggagacaagttttctcgaagccgtgttcgcgcgcggtgaccgcaaactgaatgccgttattctggaggcccataagcgcggcatgcgctttgacggctgggcggactgcttcgattttgacgcgtggatgcaggtctttaaagatctcggcatagaccccgcgttctacgcaaaccgccagcgcagctttgatgaggtcttcccgtgggatcacctcgattacggcattaaaaaggaatttctcatcgaggaatgtaagcgcgcctatgcgtctgagacgacgccgaactgccgcgaaaaatgctctgcctgcggtgcagcctgctttaaaggaggtctttgcgttgagaaaagatgttagagtctggttttccaaaaccggcacggcacggtacatttcgcaccttgatttaaaccgttgcatgtcccgcgcgttccacaaagcaaagctgccgctgtggtacacggagggctttaacccgcacgtgttcttgacgttcgcggccccgctttcgctcggctttgaaggccgtcacgaatcgatggacattcgcctcatcgaggacatgccgtatccggagctcatcgaaaaattgaacgccggtctgccgcacgatatccgcgtgtgggcggtgacggaacccgaaatgaagggcaacgatgtcgcaaacgccgagtacatcctgcgtctggagtgcgaagacccggcgtttgaaaaaagcgagatgcagcgcgtgcttaccgagccggagcttacggtaaagaagcactccaaaaagggcgaaaagatcgtcgatatcaagccgtactttgaagacatgacgtttgaagaaaaaccaaactgccttgaaatgacggtgcgcctgcccgcgggcaaccagggcggtattaacccgacgctctttgtggacgccgcagagcgcgtactgaaccgcgagttgcttgtccgcgtggagcgcacgcggcttttcgacagcgcgttccgcgaatttaagtaaaacggcggaaaatcacgtctgtttttcgcgtaatgcgcagtttatctgcattttttcgcgatctttgtgcgggtttccgttaaaaaacacttgcttttttccgcatgttgtgataaactatttaagcatttgaaatccgttggccctcaaacgctgccaatggggatcaatgcacggtgcaaaccgcgtcattgaagcggacagtcctctgcggcgcgtaccgcatgaatgtctgaaaaattatcaggaggaagatcaaatggacgcattaaagcttattgctgccgattccgttaaggagcaggcacctgagttcaacgttggcgataccatccgtatcgacgtaaacatccgcgagggtgagcgtgaaagaattcagcagttcgaaggcacagttattgcccgcaagggttccggtgtaggcgagaccttcacggttcgccgtgtttcctacggcgtaggcgtggagcgtgtattcccgctgcattccccgaacgtgaagaacattgtcgttgtccgtaagggccgtgttcgccgtgcaaagctctactatctgcgtgaccgcgtcggtaaggctgctaaggtcaagagccaggttcgctaaatcgaatagcaaacggagtaaaaggggcaatgctttgtcccttttttactttatatagaaataatacactgtaaaaacagaaattggtgaaagctgcatggaaaaaaacatcaaaaccgcgtctaaaggcgtccgctccatgtatgagtggctggaggagattgtctttgcgcttgtggccgtcatccttgtgttcacgttcctgttccgtgttgttaccgtcacgggcaagtcgatgctgccgaattttgtagagggcgaaaaggtcgttgtcacgaacctcgggcacgacatagagcagggcaccgtggtcgttgtcacgaacgttttggaggaacccatcatcaagcgcgtcatcgcaacggaggggcagacggtcaatatcgattacgacaccggcaccgtgtatatcgatggcgaagcgctgaacgaaacgcagttcggcattgaaaacggcatcacgttccatccgtatgacgggtatgaagcgctcgtgttcccgcagaccgtgccgaagggctgcgtgttcgttttgggcgataaccgcaccgtatcaagggacagccgttatgcggagatcggcatgatcgacacgcgccatatcatgggagaagccgtgttcacgctttacccgttcgatcgcttcggttttgtgaaaacgaatgagaacaactaagaaaacaagatacccagagaggatacagtatgagtgaagtacaatcggtacagtggtttccgggtcacatggcgaaaacgcgccgcgccatccaaagcagtctaaagcttgtggatattgtcgcggagcttatcgatgcccgcatccccgtcagcagccgcaacccggtgctgaaaagcatcatcggcaataagcccaaaatcgtgctgctgaataaattcgatatggcagatcccgcccgcacggcggagtggatggattattttaaacagcataaaactgtcgccatcccgatcgactgcaagaccggcaagggcctaaaccgcttgctgccggagatcaaaaacatcctgcgtgagcaaattgctgcgtgggaacgcaagggcatggtgggcagacccatccgcatcatggtcgtcggtgtgccgaatgtcggcaaatcgtcgctcatcaaccgcctttgtaagggcggcaacgcaggcaaagctgccgtgcaggataaaccgggcgtgacgcgccgcaaccagtggttcgcgattggcaagggtctcgagctgctcgataccccgggcgtgctgtggccgaagtttgaagatccggtcgtcggcgaacatttggcgttcaccggtgccgtgcgcgacgaaattctcgacattgagggactttcttaccgcctgttggagcttttgcaggacttatatcccgaagccgtcaacacgcgttataaaacggatattcgtcccgaagaagaacttaagggtcacgaaattctggagcgcatcggcagaaagcgcggtatgctcatttccggcggcgaaatcgataccgagcgcgcagccgtgaacgtgttggacgaataccgcggcggcaaactcggacgcatcacattagagcccgtcggccgcccgttaaagtaatatcggaaaggaaaattccatggattattcctttgaacatgaagcctatttaaaaggctataccgccgtctgcggtatcgatgaagccggccgcggtccgcttgccggccccgtttacgcagctgccgtgtggcttccggaggggcttgtcatcgacggcatcaatgattccaaaaagctgagcgaaaaaaagcgtgaggcgctctttgacgtcattaaagaaaatgccgtcgcttacggtatcggctttgcggacgaaaaagagatcgatgagattaacattttacaggcgacatatctcgccatgcgccgtgcgtatgacaatatgcagaaagcgtgcgattatgtgctcatcgacggcaaccgtatgccgcccatgcccgtgccgggcgagaccatcgtcaagggcgatgcaaatagccccagcatcgcggcagcatcaatcttggcgaaagtcagccgagaccgcgtgatgctggaatacgcaaagcaataccccggatatcatttcgagaagcacaagggctacggcaccaaagtgcatgtggaagcactgcacgaattcggcccgtgccccatccaccgcaagacgtttttaaagaaaattctgggctgaggaggtgcgcgcatgccaaacaccggttccggccgcctcggcgagcagctgacggcggaatatctggaagaaaaaggctacgagatcgtggagcgcaacttcaagtgccgcttcggcgagatcgatgtcatcgcgcagaatgaccgttaccttgcgtttgtggaggtgaagacccgcagcgcagacggcctcagccacccgtttgaagccattacgccctctaagcgcgcgaaggtcatcaaaacggcacagtattatctcatcaaccacgaaacgaatttgcagccgcgctttgacgccgctgccgtgtttaccgaaaacggagcgttagtcaagattgaatatctcgaaaacgctttttattaaaatcaaattcgctttcaaaagcgaaaaatgacgaaagggtgcttttcatgcgctattttgacctgcactgtgacacgcttgtagcgtgccttgaccaaaacaaatctttgatcgacaatgacctgcacgtcagcgtaaagaagggtgaccgctttgcgccgtatgtgcagtgcgccgccgtgtggctgcccgattcggtgcgcggcgctgcggctttgcagtattttgaccgccatgcggcctatttccgcaaaatggccgagacgggcgcgttcaccgtgctcgaaaccggggaagatctcgaaaagctcggcaacaaacagggtacggcgtttattttgaccgtagagggtggctctgccgttgccggcgatctcaagaatattcaccacctgcgcgaaaacggcgtgcgtgttatgacgctcacatggaacggcagcaatgagatcggcagcggcgtcatgtccggcgataagttcggccttacgccgttcggcaagcttgccgtgaaggaaatggaaaaagagggcatcgttattgacatttctcacgcttccgaagcactcttttacgacgtggccggaaacaccgaacgcccgttcatcgcgacgcactcgaactccaaggtgctctgcaagcacccgagaaacctcacggacgaccagttccgcatcatctgcaaccgcggcggccttgtgggtctcaactatttcaaagcattcttgaacgatgccccggcaaaggcggacattgaagacctgttcgcgcacgcagagcactttttgtccctcggcggcgcggacgtcgtcgccatgggcagcgattttgacggatccgacatgccgcatggcatcacaggtctcgaatccgtagaggacattgcaaacgttttcctgcgtcataatctgccggaagcgcttgtggataaaattttctttgaaaatgcggcgtctttcttcaaacgctttgacaggaacgcctgaatacagtataatacgactgacttgatttaggaggcggatgccatgaattacaacagcacacgaaacgccgcgcttcaggtgacggcggcgcaggccatcgcacagggtatctccgaggaggggggcctttttgttccgcagagcttcccgaaagcggacttaaacgacatgctcgggctcgactatatcggccgtgccgagtacgtgctctcgcgctttctgacggatttcaccccggaggagattaaagcgtgcgccgaaagcgcttatggcggcggtaagtttgacgataatacccccgcaccggtcgtgtctctcgataaacacggcgaaaacaaacatattttagagctgtggcacggcccaacctgcgcgtttaaagacatggcgctgcaaattctgccgcaccttttgacccgctcgcttaaaaagacggcggatggaaaaacggcggtcatactggtcgcaacatccggcgataccggcaaggcggcgctcgagggctttaaggacgtcgcgggcacggagatgatcgtgttctaccccgaaaacggcgtcagccccatgcagaagcgccagatgaacacgcaggagggcgaaaacgtctgcgtgtgcgctatccacggcaactttgacgacgcacagaccggcgtgaagaaaattttcaccgatcccgcgctcaaggccgagcttgcgcagcacaacaagatgttctccagtgcgaactctatcaattggggtcgcttgctgccgcagatcgtctactatttctccgcgtacctcgaccttgtgaatgcgaagaaaattaagatgggcgatgcaatcaacgtcgtcgttcccacgggcaacttcggcaacatcctcgcttcctactatgcgaagcgcatgggtctgccggtacacaagtttatctgcgcgtcgaacagcaacaacgtgctgacggattttatccgcaccggtacgtacgacaaaaagcgcgtgttttataccaccatttcgccgtccatggatattctggtctccagcaatctggaaagactgctttaccacttgtgcggcgaagacaccgaaaagctcacgggctggatgaacgccctgcaaagcggcggcgcatacaccgtagacgccgcaacggccgatgctgtacgcgcgctgttctacggcggctgctgcgatgataaggaaaccgttgaagtcatccgcaatacgtttgaaaaagacgggtacctgtgcgatacgcacacagcggtcgcggtcggcgtttacgagcagtatttgaaagagaccggcgacaacacgcccgccgtcattgcttccactgcaagcccgtataaattcccggacagcgtgctcgacgcgttcgattgcgaaaagcccgcagatccgtttgcggaggccgagctgctcgcgaagctttcaaacacaaagatccctgcgccaatcacagcgttaaggacgaagcccgtccgctttgaaaacacctgcgccgctgccgatatggcagattttgtgcgcgaaacggtcagagtgtaaaatggcgctgtacgcgatcgccgatctgcacctttcccttggtacagataagccgatggatgtgttccgcggctgggaaaactatgtggagcggctggagaaaaactggcgcgccctcgttaccgaagaggataccgtcgtcatcgccggggatatttcctggggcatgcggctggaagagaccggaaaggatttcgcgttcatcgaaagtctgccgggcaaaaagctattgttaaaaggcaaccacgattactggtggtccacgcgcaacaagatcgagacattctttgcgcaaaagggcttcaaaacgatgcagctcgtgttcaactccgccgagcgtgtgggggacattacggtctgcggcacgcgcggctggctctataacgccgaaacggcagaggataaaaaaatcgtcgcgcgcgaaaacgggcgtctcatcgcgtccttaaacgccgcaaaagccctcggcggcacacccgtcgtgttcctgcattacccgccggcgtacgataccgcacagtgccgggaattgctggatacgatgcaggcatacggcgtaaaggagtgctactacgggcacattcacggcgatcacgccgcaaaaaaagcgccgcttggtgaatatgggggcataaaaatgcaccttgtctcgtgtgattatatccgtttcaccccgaaattggtgcgaaaagacgcagaaatcggctgaatttttaacaaattataaaatatcaaaaaattcaaaggtttgtctggaatattcggcacaggtgtgctataatgtcaaaaggtatcgcgcattacgggtatatccgcccgcgtgttccaaataaaattgtaatttatttttgagaggatagaaggaaatgaacttaaaggcaaccaacaaaaccgaaaccaacaagtatgagctggaggtcgaaatctccgctgaagatttcaacaaagcactctccgaggtcgcaaagaccgagggcaagaagatgtctgttccgggcttccgcaagggtcatgctccgagatccgtcatcgagaagatgtacggcgaaaacgtgttctttgaagctgctgtggacaagctctatcgcccggctatgcaggacgctatcgaagcttccggtctggaagtcatcgcggtttccaatgcggacgttacctccgtttcccgcgagaacggcatcgagctgaagctcaccgttgttgtgaagccggtgattaccattgaaggctacaagggcatcgaggctacgaagaagaatgtcgaagttacggatgaagacgtcagcgcagagctcgtaaaggttcaggacagaaactccagaatggtcgacgtcgataacagaggcgcgcttacgggcgacaccgcagtcatcgatttcgagggcttctgcgacggcaaggctttcgagggcggcaaagcggaaggcttcgagctttccctcggctccggtcagtttatcccgggctttgaagatcaggtcgtcggccatgaagtcggcgacgagttcgagatcagcgtgaagttcccggaggactatcaggcagaagagctcaagggcaaggacgcgaccttcaagatcaagctgcaccagatcaagcgcaaggagctcccgaccctcgacgatgagttcgcaaaggacgtaagcgagttcgatacgctcgacgagtacaagaacagcctccgcgagaagctgcagagcgaccgcgagaagcaggaagagatgaacgttgagaaccagatctttgatgcactcatcgagaaggtacagggcgagattccggaagagatgtacgagcaggaagttgaggagagcatcaacaacttcgcataccgcctccagtctcagggactgaacctcgagacctatctcaagtacaccggcatggacgtcaacgccatcaaggagcagttcagaccgcagtccgagaagcagcttaagctgagactcgcacttgagaagattgctgagcttgagaacctcgaagtttccgatgaggctgttgaggaagaatacgagaaactcgcaaagcagtacaatatggaagtcgcgcagatcaagaacctcgttgcagagacgcagatcagagcagaccttaaaaaccagaaggcgatcgactttgttaaggaaaacgcttccgtaaaagcagaaaagccggcaaagaagaccaccagaagaaagagcaccaagaaggcagcggaagaaaaaaccgaggaaacagctgaagctaagaccgaggaataatttaccgcctttacggttagtattatagtaacagcatatcatatatcgcttctttcgcccgctgtccctgcatcggacagcgggcgaagcaaaagaagcgcgaaaggagtttgtacgatgagtttggtaccttatgttgtggagcagacgagcagaggagagcgttcctacgatattttctcccgtcttctcaacgatagaatcatcatgctgaacgacgaggtgaacaacaccacggcaagccttgtcgtagcacagcttctgtatctcgagggtcaggaccccgataaggacatcagcctgtatatcaacagccccggcggtgtcatcacggccggcatggcgatttatgataccatgcagtacattaagtgcgatgtttccaccatctgcatgggcatggcagcttccatgggtgcgttcctgctggctgccggcgcaaagggcaagcgctatgcgctgccgaacgccgagattatgattcatcagccgtccggcggtgcgcagggtcaggctacggatatccagattcaggcagagcgtattcttcagacgaagaagagcctcaacaccatcctcgcagagcgtacgggtcagccgtacgaagtcatctgcaaggatacggagcgcgataacttcatgaccgcacagcaggccatggagtacggccttattgataaggtcatcgcaacgaaatcgaaataacgaaagggcgtgttttcatgccgaataatttcggaaatgataacgaagtgcgctgctccttctgcgggaagccgcagtcgcaggcaaagcgcctgatctccggcaacggcgtgtatatctgtgacgaatgcgtagagctctgcatggacatcatcgcggatgaagattctctccaccgcggccgcccgcagccgaaaaacgagccgcgcgccgaaatggttctgccgaagccgcaggagatcaaaaagcagctcgatgaatacgtcgtcgggcaggacgaagccaaaatgacgctcgcggtggcggtctataaccactataagcgcattttcttcagcggtgaagacggcggcgtggagattgcaaagagcaacgtgctgctgcttggtcccaccggcgtcggcaagacctatcttgcgcagacgcttgcaaagcttttggacgttccgttcgccattgcggacgcaacgactctgacggaagccggctatgtcggcgaagacgtcgaaaacatcctgctgcgtctcattcaggcagcagattacgacattgagcgtgccgagcacggcatcatctatgtcgatgagatcgataagatctccagaaagtccgaaaacccgtccattacgcgcgacgtcagtggcgagggtgtgcagcaggcgctgctcaaaattttggagggcaccattgccggcgtcccgccgaagggcggcagaaagcacccgcagcaggaggtcatcaacatcgatacctcgaacatcctcttcatctgcggcggtgcgttcgacggccttaaaagcgtcattcagcgccgcaccgaagcgcagacgctgggctttaactcggtcatcaagagcaaaaatgagcttgataacacggagtggatgaaagaagttaccccgcacgacctcgtcaagttcggcctcatcccggagcttgtcggtcgtctgccggtcatcaccgcgctgagcgacctcgacaaagccgcacttgtgcgcattctcacagagccgaaaaactgccttgtcagccagtataagaagctttttgaccttgataaggtcgatttggagttcacacccgaagcgcttgacgccattgcggaaaagaccattgcccgcaaaaccggcgcccgtggcctgcgttccattatggaagatacgctgaagaacctgatgtttgaggtcccgagcgattatacgatcgaaaagatcaccgttaccaaggattcggtagagaacggcgctgcgcctgaaatcgtgcacaatcccgaccgcgtcccggtaaagatcaaaatgacacaacccaaacggcgcgctcgcaaggattcggcatcatagtgatcatcatacaggctgtgcagcgatccctgctgcgcagccttgtctgatttataaggatttgataattttatgaaagaaaccatacttgaggaagagagagttctgccggtactcgccgtacgcggactcgtcgtgttccccggcatgatcgtgcagtttgatatcggcagaaaaaattccgttctggccgccaaagcggcgctggatacggatagccgcgagctgttcatcgtcacgcaaaccgacctttcggaaagcgagcccatggcggaagacctctataaaatcggtgtcatcgtccgcatcaagcaggtggtacacaccgcagataacggcatcaagttgcatgtggaaggcatcgagcgcgcggagattatgtccgttgtgcaaaatgagccgtacctcacgggcagcgtgtgcgtgtgcaagccgatcgccgcacgccacaccgcaagaacggaagcgcttagccgcattgcacaggagagatttgaagagtacatccgctggttccgtcaggtgccgccggatattctgctcggcgttatgcagcagaaggactgcggtgatttggccgactttatcgcagcgaacatctcgctcgatttcgagcagaagcagtgcatcctcgacgagctccacccggaaaagcgtattgcaaaactcaatgatattttgagcgatgaaatcaaagtcttatcgctcgaacgtgagatttcgcaaaaggcgcaggagcaaatggatgaaaatcagcgcgtttacatgctgcgcgagcagatgcgcgccattgcaagcgagcttggcgaagaggataacccgcaggaggaatccgacgaattccgccagagaatagaaaaaataaacctgccgcaggtcgcgcgcgaaaagctcttaaaagagtgcgatcgcctcgccaaaatgccatacggctcgcatgaaggctccgtcatgcgcatgtacctcgaaacgtgccttgagctgccgtggaacacgagctccaaggagcgcttggacctcgaccgcgcggagaaaattctcaaccgcgaccattacggcatggaaaaggttaaagcaagatttttggagacgctcgccgtgcgcaagctctctgaccaggcgacggggcagatcatttgccttgtcggcccgccgggcgttggcaaaacgtccattgcgcgctctatcgccgaggcgaccggccgcaagtacgtgcgcgtttctctcggcggcgtgcgcgacgaagcggacatcatgggccatcgccgcacctacgtcggctccatgccgggccgcatcatggcggctgtgaagcaggcgggcacgaataaccccctcatcctgctcgatgagatcgataagctcggccagagctttaagggcgatccgtccgcgtcgctgcttgaagtgctcgatcccgaacagaacagcgcgtttcaggaccattacatcgacctgccgttcgacctcagccacgtgctgtttgtcaccacggcaaacgacgcttccgccattccgggcccgctctacgaccgcatggacgtcattacgctcggcagctacacggcggaggaaaagttccacatcgcctcgaaatatttggtgcccaagcagctgaaaaagcacggcatcaaggcggcgcagctgcgcttcacaccgaaggcactgcacgcaatcatcgaagactacacccgcgaagccggcgtgcgcacattggagcgcaccatcggcaccatttgccgcaaagtcgcgcgccgcatcgtcacggaggaagattttaagtcttattccgtgaagcccgccgatcttgaagacctgctcggcccggcaaagtttgcgaaggataaagaagaacgccgcgacgagatcggccttgtgaacggtcttgcgtggacaagcgtcggcggcgagctgctgcccatcgaagttgccgtgatgaacggcacgggcaaaattcagctcaccggctcgctcggcgatgtgatgaaggaatccgccacaacggcgatcacctgcattcgcacccgcgcggaaacgcttggcatcagcccggatttctacgcgaaaaaggatattcacatccacgcgccggagggcgccgtaccgaaggacggtccgtctgccggtatcgccatggcaaccgccgtcacgtccgcgctgtgcgaagagcccatcgcgcacgatatcgccatgacgggtgagatcacgctgcaggggcgcgtgctgcccatcggcggcctgcgcgaaaaatccatggcggcgtataaaaacggcatgaagaccgtcatcatcccgcacgggaacatcgcggatctcgccgaagttgatcaggtcgtcaaggataacgtgcggtttgtgccggtgcgccgtatcgatgaggtgctgcccatcgccatgcccgggcttttaaacagagaaaccaagccgaatacgccttgcccggagcccgcgcacggcgtacagacactcagacagtaaggggaacaccgtgaattttcagtcagtagaatttgaagctgccgccggccgtgcggatcagctcaaaaagtcggacttgccggagatcgttttttccggtaaatccaatgtgggcaaatcctcgctcatcaataagctcgtcaaccgcaaggcgcttgcacgcgtcagcgccacgcccggcaaaacggcgaccatcaactttttccgtctgccggagtgccgctttgtagacctgccgggctacggctacgccaaggtttcacaaagcgaaaagcagcgctgggcaaagctgatgcagggatattttgatgcagagcgcaacgtggcgctcgtcatccaaattctcgatatgcgccatgagccgactgcggacgatttcgatatgattaacttccttatcgagcgtgacctgccgttcctcgtcgtctgtacgaaaagcgataagctgaacaaaacgcagttcaacgcgcagaacgcgtattttgaggacctgttccgtgagcatgaaatcccgttcatcccgtattcctcccagaccggcttcggtttggagacgctgaaacagcacatcgaagctgccgttttgggtaactgagcagctgcgaagtatagatccaccactttttgaagggaatgaaaaatatgtttgtatccgattgttacaatgtcaatgaaaaaggccacctgacaatcagcggctgcgacaccgtgacgcttgccgaaaagtacggcaccgcgctgtatgtgatgagcgaagatgagatccgcagcgtttgccgccgctataagtcttcgtttgagcgccactataacggaaaaggcaccgcgctgtatgccagtaaggcgttctgctgcaaagagatttgccgtatcgtgaccgaagaaggattagacctcgacgtcgtctccggcggcgagctgtataccgcccttgcagcgggtgtggatgcaaaacacattcatttccatggcaacaataaaacaatgcaggaactccgctatgcgcttgaaagcggcgtaggcgacattgtcgttgataacttaaacgagctgcaccgcattgaaaagctctctgcggaaaaaggcgtcgttacgtccatttccatgcgcatcaagcccggcattgacgcccacacgcatgagtttatccgcacgggtcagatcgattccaagttcggctttgcacttgaaaacggcgaggcatttgaagccgtaaaggaagccgtcgcgtgcgaaaatgtagagctcatcggtctgcactgccacatcggctcgcagattttcgacaaagccccgttcgtgctggcggcgcaggtcatgctgaagttctataacaagatccatacagagctcggcaaaacgctgacacacctcaacctcggcggcggcttcggcgtaaagtacaaggaagccgatgcagccgtgccgtatgaagattacatgagcgacgtttccgaagccgtgcatgctgcctgcaaggagtacggtattcaggtaccgtatatttacattgagccgggacgctccatcgtgtgcgaggccggcctcacgctgtacaccgtcggcgatatcaagaccatcccgaatgtgcgtacatatgtggctattgacggcggcatgtatgaaaacccgcgttacgcgctctatcagtcggattacacttgcctcatcgcaaataaggtgaacgagcccgcagattttacggcgaccattgccggcaagtgctgcgaaagcggcgacctcattcaggagaacacgctcattcaaaagcccgaggtcggcgatattctggcggtgctctccaccggcgcgtacaactactccatggcatcgaattacaaccgcaacacgcgtcctccggtcgtcatggttcgcggcggagaatcccgtgtcatcatcaaaggggagacctatgaagacctcgtgcgcaacgatgtgtgatttcacgcactgctgtgcaaaaatttcttgatttcggtgtttacttttgtgcttttgtatgttaaaataaaaaagtaaagaacctcgttgacgaaaagacggcgcatttggtgctttatggcataaatgcgccgttttcggatgcaaattcataaagaaaggaacacagaaacaatgaataccaaactgcatgatgaaaacgttgatttcctttttgatgctattctcacgctgaaaaaccgcgaggaatgctataaattttttgaagatctctgcaccgtgccggagctgaaagccatgtcgcagcgcattgcggttgccaaaatgctcagcgagcgccacgtgtacagcgacatcgtcgataagaccggcgcttccactgcgaccatcagccgtgtcaatcgctctttgaattacggcagcgacggctacacactgatttttgagcgcctgttgaccggcggcggaaaagaggactaatggccggctacgacgtttttgcgcgctattacgatgcgttgaccgcgaacgtggattataagggccgcgcggcgtatttaaagaagctactcgagcatctccaccatgaaccgggcatcgtcttagaccttgcctgcggtaccggcagccttacgctggagctttataagcttggcatggatgtgtacggcgtggacggctccatcgccatgctgtccgaagcgaaggacaaggcttacgacatgaaagccgatgtgatgttcctttgtcagaaaatgcagacgctcgacctgttcggcacggtcaacacggtgttctgttcgctggacagcatcaaccacctctccggcgaagcgcaggtgcaggcggcatttgaccgcgtggcgtttttcatggataacgacagctggttcattttcgacgtaaacacgctctataagcacgaaaaggtgctgggcaacaacacctatatttacgaccttgcggatatttactgcgcatggcagaaccgctataatccgcaggatcacagtgtggcgatctctctcgatttctttgagaaagagggtaaggtctatacgcgcagcagcgagcatttctttgagcacgcatacagcgtggagaagctgacggaaatgctgaaaaagtccggctttgatagggtggaggtcttcggtgacctctctttcgacgcgccgaagccggaggagcagcgcattattttcgccgcacacatcacaaactcacaaaacggcgtttttaaggacgatattgctccgtaaaacgctccgaaaggaagaatttcattggataggattattcgctgcatcacatcggacggcgcacttatggcctccgcaatcgattcaagcgatacggtatataccgcgcagaggctgcacggcctcagcgccacggcttccgctgcgcttggaagactgcttaccgcggcgtccatcatgggcgctatgcaaaagcaagagcatgctacgctcacgttgcgcataaacggcggcggtcccatcggcaccgtcacggcaatctccgacagccacggcaatgtgcgcggctgtgtggacaatccgaacgtagacgtgcccctgaagccgaacggcaagctggacgtcagcgccgcagtcggtacagacggccgccttggtgtcatccgcagctacggtacgggagagccgtatatgggccaagtggagctcgtcagcggcgagatcgccgaggacatcacgaattattacgccgtgagcgagcagatccccacggtgtgcgcactcggcgtgcttgtagacccgaacacgaacggcgtgctgcttgcaggcggtctgcttattcaagtgctgcccggcgcgctgccgcaggacattgaaaagctggaagcgaatatcgcaacgctggagcctgtcaccaccatgcttgcaaagggcatgaccgtggagcagatggtcgacacggcgctcacgggctttgaagtcgaaaagctggaggaaatccccgtgcactacgcctgcacatgcagccgtgagaagtattataatgcccttgcgaccttggagccggatgaaatcgatacgctgccggctgtggacggcaaggtggaagcggtgtgtccgtactgctgccgcaagtattacttcacaaaagaggagctgcacgagcttgccgaaagcgtgcgcgaaaagcgtaaaaatgcctcaaaataacttttttgaaaaagttttggagaaggtattgactttttaataagcatgtggtaatatatacaacgtcgctggaaggcataagacttcaaaagagccgcaagttctgttgaaagatttctgaaaagcgatgctgtttgggggtatagctcagctggttagagcacctgccttacaagcagggggtcataggttcgagtcctattgtccccaccaaatgtggcccggtagttcagctggttagaacgctagcctgtcacgctagaggtcgacggttcgagcccgttccgggtcgccacatttgcctctgtagctcagttggtagagcaggggactgaaaatccccgtgtcattggttcgattccgatcggaggcaccatatgcggacgtagctcatctggtagagcgccaccttgccaaggtggaggtagcgagttcgagcctcgtcgtccgctccaaaagaaaaagacgctgaagataaggcgtctttttcaaaatggtgacatagccaagtggtaaggcaagggtctgcaaaaccctgattccccggttcaaatccgggtgtcacctccagaagattttatcttagttatgcgctcaacggaagtccgttgggcgcgttgactaagtaaatatattgcgtttatgcaatttaccttgactttgatcaagagggtttacttacaggaggagaacaattctggttcggaattgttgctcaatttttaagcagaaccgaggtgaattgtattttgaaaacgcgaaataaacttccaaatgtatatggccattgcccttcatttccgcgaatgagtactcgtgcttctaagtattcttgtgcttatttcgacttcaaaaattccacatgtaaatttttgtcaaaggaaagtccagaggcatgtaagtttggaaagtgcaaattgtatgcaattagagcgttagatgatactgagtggattttagaagattaactttgctctaatgtatgtgcacaaccacttctagctgtgcacatcaattaaaacaaagaatatttgttttaatatttctggttttagtgacccgttctcagacgccgttcctgtacgtgcggcacgatcaggtttgtccggtcgcgcttatccgcgtgattcccattgtagaggcgtgcacatgcacactgatttgcgccgggtattctcgtctgtgggttcattcgattgtcaaggtacgggcaaaataaaagagagccttccgcagatgtaacagcaaaaggctcttgaacacagacttataatgtgttataatacatacgtattaaacacaatatgagtataagcttcacgagttcctttagatgttggcgcatctgaacggaataaatcaaaaaattgtctgacaattttttgatttagtggggctttattcattttgcaatatatattttactactataagccgcaaatttcaagtctttttttaaaattcgggaaaaatttctcgaatttttttatttttcaggattttttgatttgagaaagacgcataatttctgtttcaaggtgctccatatccggcgaaacgtacttttgcagcgtgaaaacaacgtttttgtgccccagaagcatagagacgcttttcggatcggcgcctttttctatcagccgtgtagcaaaggtgtgccgtagtatatgtggagtaacatgacaaataccggcggcctttgaaacgcgtgtacagatatagcgcaaatgatatgtgctgaacggtttattcccgttatcagccacgctgaatatatagtcatgcggcttgttatactcggtattacaccggatcatgtagagtatagcggcggcttcgggcaaaacagggagaaggcggacaccggcctcggttttgctttcaggaattttgagcgtgcggttttgcggatcgtattgccgccattgcatcaggcgtagctcatcccggcgcagaccggtcaataaatacatgcgcagaatgtattcatctatcggttttttcagtatgtgaaaacatccttcaaatgcggcctgttctcgttgtgtaagcgctttaacttctttttctcgcgcggcgggaagtgctgcgtctttaacgggattatcgtcacagttatgtccctttattgcggatttgtatgcttgattcagcataacgcggatatggcgcagcgttgactttgcatacttctgccgcatggagtccaaccagccttcaacctgtaaagcattgagctcaacgagaagaataccggcggcctccgggtgatgggtcagcagccgccgtctggcgtcccggtaaatgcttatggtgttgggctttcgctttgtgggcgcgatttcttcgagccaaatattaagccattcgccgagtgtgtaatcccttttgtttgtttcgtacatgttgctacttcctttattaaaattccccacatagggtgcttgaattctaacaaaggcgaagatgaaaagcaaaaaaaaccggaagtacttccggttttttaacagcaaatctgttgacaaagaaagttgttttgcatataataatagtggagatgttgcatcttcgcttagagggtgtatctcagcccataagtgagacatttaatacgtgagcttctcttggctctatatcaagacatttacaagtgagtgtttcgctactcggaatgcgaacgtaacctagcagggcgggctttgtgtccgccctatttctttatcttggaggggaaatggataatatcagattttacgaaatcaatgcaaaatatgttgactatcttgctccgtatgcaccgcatttatttcataatagtaaaaagggacaagccaatcagagaaagtatatcggaatcgtttttcagataaacgacatggagtattttgcacctttgtcttcttttaaaccaaaacacgagaaaatgaaagagggattggattttatcaaaattctcagatatgcagtgataaatttgaataacatgttccctgtaccgtacagtgaacgtgtatatgtgaattttgaaacgatcaaagatcccaattacaaatcattacttcttgctgaatatcgctacataaagtccgtgcagaaaaagattcagaagaatgctgctgcgttatataaacacaagcagatcaatggcgattcaacctcgttagctcggagatgtaatgattatgcgttgctagaagataaatgtagaagctataaaagaaaatagaaatcgaaaaagcggaagtacttccgctttttgcttgacaaacggagagaaataacctatactggaagcagaaaaggggcacttgtagtgtcaccttgcctgagaaaatgagctgattccttcacccggtcacagctcattttcttttttctatccggaaaactccaccatgggacttcgtgcacgatccattacttttcggcgcaaaagccccattagagaattactcttagctaatggtaaacttttattttttctttccttactaataaaacaacggggtataggaaagagcaggtgcatagatgataagggtgctgcaaaaagggaatacgcataacggcgcttcagggcagctgtacgctgtctcttgcgttcgagcacgagtttgtgcatctgatagaaaaagagcatggtgcggctctgctggcgctttaagcgtgctacgcgctcatgcagggagagggcacggaaacgattgatgccctgacggtcatagtccggtacagcatcaatcaagttgcgttccttgagctgccggattgcgcggctgattgtgagggccgagcagtggaatttcttggcgagcacacgacggctcagagaccaggactccttaccgcagcggtttaagagctcgacgtagaccaaaaaggcggtatcacggagctcggaaatcaagtaacgcgggaagcgcagcttgaatccctccatgcgcggctgaatatgagaggtaatctgctgcccgccgcgagtacggtgcttgacagaaacgagctctttttcgataagggtgcgcagagcgcgggtatatgtggtgaggttgatgtcaagctttgcgcaggtcgttttgcgcttcagatcgaaaacaccggtacggtaatcgacatgaagctgcatgaatgcaaacaggcgggcttcggtggttgtgagatcagaatcgacaacaagtgtcgtaatgtacgtgccgaagccggttttcttttgctttgccatactggcgtctcctttctgagttttgattttgataaaagaaaaaccggaagtacttccggtttttgagctaaatctgcggcaaattaaggcttacgaggaaagcttgcctcatccgatgcgtagggcttttgttttaagtactttctttcgttggttcagcgtcaatttcttctagacttgtatcatctgtgactgaggggcttactgaagatagctgcaagcttagaggaagaccgttttcacgaacaatctggctgtaaaacatccgaatggcgcttgttggagaaatgccgagctgtgtgagaatgttttcggctttttctttcacttcagtatcaacacgtgcgaaaactacggtagtctttgccatttgggatacgctccttataaaatatagtatatacaagtttgtttacaaatgcaagcattcaaaaacaaaatgtttgaagataacagaaaaaccggaagtacttccggtttttaataatctgcggtgctgtccacggactctgacggattggcagattctcgcttttcccgtacagtctgtcgccattttctttcttttatagttcgtataacatcatccaacttggcgtagacggtgggaacatactctcgtgtttctgagatataaggagcttctaggcgaatgccccatttatcgtagcgcggcatattggcgataaacgggtgactgcctcgccggttgacgacccatttgccaaagggcaggagctgcaattcgtccggtgtcatcaatggccgtgcaatcatgttgacgctgcggctgctatttgatccactaccaaaaaggctgcggccttcccggttgttggttgaaacggaaccggcagcgaccgtctgatttccaagcagcttgctgaaggtaacggcggtatcggacatgggagaaaagccaccgaaaataacggtctggcagcagtctcgaataatagtttcgccgtctgcaccgtaggtctgtctgagctgtgccggtgactggatgcagggcacgataataatgttacgggatcgcgaagcgccgaacatgccgagaatgttgcccatataaggaaaaatgccgaattcatcggcgaagatataaaggcggcgtgtaagcttattttcttttgtgcgttcatctgcatagacgatggcttcatttatgatctggctaagaaaaagggagaccaatacgtgttttgtggcatcttcttccgggaatgtgatgaatacggcaacttttttctggtagatgtctgcgactgtgattttggaattcttgcagagaatgttttctgactctgagtcgatgaaggcaagcaggcgggacatggaggttgtgataacagataaatactgcataccctcgctgcccggtacggagcctgcaaaccaacggattttatcatcttcaggtagaagactgagaatttcattcagctttgtttgcttgactttcctttggctatcggtctcatcatttgcggatttaacggtttgaacgaattcgagaagaattttaaatacggaaacgatatgacgttcttccggcttgcagtattgcgcaacaagcaggattatggaggtgatcaagccttcagaggaatcgtagaaatacgagttctgaccgccgccgtcaaagccctttgtgtggacaatagagtttgcaagagcttttgcgtagcgctcggcgcggctgtggtagtctacacgtttagggtcatcgcgccacatatctatgtagagattgatgagctgcatgtaattgtagctgtcgcttttcatcggtgtgcggaagttgatattcaaacaggtatagccgtattgttcgcagagcttaccgtataaacggagcaggtcacctttgctatccgttgagataaaggaagtaccgcaagcgagcgcgtattcgatattcggaatcataaaggtggtggttttgccgccgccggttccggcaaccatgagagtgtggctgtctgaaggatcaatggttgcgagaatttgttttttgttctgtttcaaattaacgacgatgcctgcggtagtcgggcggctttctttgttgtatctccacgcttccggctcgtaaggaacttggatagtcgaactctgtatctcctcttgtgttgcccaacgggcagtgccatactggccgtcgccgacggttttacgcttaatagagtccaaattgtagcgcttttgtgactcggataaaaagatcaaagcgaccaaagcaataccgacgatggataaaaatataatttgctgtggggtcatagaaactctcctttctgaattttgtctctcaagacgtcgttccagtccttcttgcacgggcacagaatagaggttatgtatttgccggaaaactgccgcatgaagcgtttggcggcttcttgccctcgattttcgggcttatttatatcgttatcaaagcagaaagcgatacgttgaatagatttgttctccttgagaaatcgacgtaaaggatcttctgaaagcccgccaagcgataagtagcttgctctgtgccacggtgcatgccgatgcagtgttagaaagctcatcaagtcgatgggtgcttcaaatacatacagcaccgtggcgttatcattggcgtatgaaaagccgcagttgaactcaccgccggtcacaaagccacggtaacgctgcgcggaattcgtgccgcgcttatgagctgattttacacggccgaagcagtcatagcatacaaatacgatgttgccttgtttatcttgataaattaaatgctcatcaatgaaagtattgacaatctcgtgtgcgatgctgcgtgtatgcgtgagatacgcatacagacgacggttatccggtgcagctggcggcaggcagaaagcaacggggatcatgtctgtgggttttgattctcgtttggtgggaggaggggcagcgagatcaaaagtgatctgtcggttgccgatgagctcaagcacagcgtgcgggaagcttttgtgaaagaagttttgcacaaaagctacggcagcgccgtgcttgccggtgctgttttgataccatttatagccgtggatcacgcagctatcgtgcttttcccagatgtaatgatttccttctttttgcaccttttcaccgcgttcgcgcagatattctacaatgtctgtgtgctgtgcaagcgcgatctgatcttgtgtcagaggaatatattcactgtggctgcgcatctgaattcctctttttactttctacgacggtaatttctatgcccttacgacggaatttttggagaaaggactttgtttgctgttttgtcaaggataaatctgtgcgcatttgtctggatgaaatagagtagttatggtcgacaatatactgatatacggcttcttcagtatttttgttcagcggcaattttatgatgtcgctcgcttggataatggaaatctgcataccgtttttacggaatttatgaatcatattgttgagctgttctctggatacattaagatcccgacaagcctttgcgatagaaatttcacagttatgttcttctatgtactgtcgtgcttctcggtaaatctgcctctcgaccgattttcggatgacacggacattcatgcctttttttcgcagtaggccgattaagctataaacctgactcggtgttacggcaagctcgtcacaagcttgtttgacagtgattttgtaattgttttcgagaacataattgtatatagctcgtgaactattagatttaaagttgattttgttgctttttttcttcatagggatcccttaaagatattactggaaaatttgttcgtagtcttctttttgaccgagcgctcgtttaagcctacgctgcatacgtctctgctttcggtcggtagtggcagactgttggtctcgcagcgtttggcggcacaaagcgttgcctatcgtattgagtaggcgagcagcaaagctgaggttctgttgctgctgttgcttttcggcgtattctgctgcacgctgttcttgacggatacgctgcatctccatgacttctaagcgttgctgcgcatagatgctgccgcgttcagccgcgaccgtataccagtgcacggcggtttcatggtctgcatcgcatccgagtccgtagcgatacatagttgcgaggcgcacggcttgttgtgctgttgccgatgtaggatgatgttcttcagcatatagcataccgacgcgtgctgccgcatagtgtgtgtaaatctccgttgcatctccgtcgatacgctgcatgagttgaccgagcttgtattcggtttccggtgttttcagtgcggccttgtagtggtctattgcaagtgaaagattttcgggcacgccaagaccgtattcatacatgcgtgcaaggcgcaagtgaatatggttttcgggatgatcgtcttttagccagatttcagcggcagttttgtagagcttttgcatatcggttaaaggcagctgctcgttattctgcatctgcgctatggcgtaagaggattcggcagttaaataatcatttgcgtttaagcacttacggtaaagtgtttcggcggtttcaacattcggcgtaaagccttgcccgtgttcaatcatttttgcgagtgcaaattggcaataggggttttcagtattggccatataccaaccggcggcacgttcataatccggtttgtcggcaggggagagcttaccgtggaaatacaaattgccgagataataggcggcgtgcttatacccacttctataagcaaactcaaaataagctgctgctttatgcggatcagtcgcgacttgcagtgcaggaagatcttccgactctatgccgtctatgtttgcgatttcaatgccggttgtgtaaatacggccgaggaaataagcggctctgctaatggcgcgctgctgcttcttttcttcagcttccagtggcccaaaatcggcaatggcatctgcataggtgttgccagccgagattgcttgaagctgcatggcgttgacgctatctaacagggtatcttcaaacccgagtttggcttttagcaaataatagttaccgagttcaacgtcttgatcttcgccctttttcaaataatactgcgctaactgataggcggcttcggtgtgaccgagctgctccgcaaggttgtaccacaggatagcgtcttgcggacatttttcatcgtaacgcaggtactgggcataccggtatttttcttcggctgttccgtcatacggcggcgaagaactttgaactttcatgttatccctccaactgcgtatgtcattggttttccatgtcgctttgaacggttcattcatttgtgcattttcaggctcatccaacgcatcagaataagaaaaaccggaagtacttccggtttttgcagatgaattttcagttttgggagtcaatgggggtgaaggttcgaactgcaaggcatactgtacgacgagatttttcaaaggatacaagttgctgcgcgtggtcgcggcagataagggcttaggctcgtccggcgtcttataataagcttcgagctgctgttgatacttgttgtactctgtaagcagctctttaatttccggaacttcactgatctcatcgagcagtttatctaccatagctttagtgacttttggcagatatttatacacatgccgaccggatgcactttcaatggacttgcgtaacgctgcaagcttttccggcaagagtagatcggtaacggcagcattgctgttatgctcgagctgtgtgaacaaggtctccaatcggtcttcaagctgttgacgtgcttcttcacgtggggcaaaaatctgatggcgttcttcagcgaaaatctccgaaacaaattcagatttcagctgctcgatggcatcttcggaaaggtatatgcgggatttttgttcagtgctgtacgcaataaagtgtgcgtgcgggtgatactttgtgttgtgcacggcagcaacccagtgcagcttagaggtcggcacacgcagcgcttgggcgattttgtccgccttaatggcgaacaactgagaccaggcatcctgtcggtcatacccgaggcggtctgcatcttcgcgccgtaaagagaagaccatgctgtaaatattgccggtatgtgcggcaatagcctccttttcggcagcgaggtcagctgcaccgtttacggtaaagagtccgtgcactttgccttcgttatggacgacgcccggacgctctgcaatgtagttgagcatgatttcaagcgtttcggggtcggcagcattagcgagaccgacttcgagtgcatgagagagtacttcgcttgcgttttcacgcgtaggggatgccttgtagtcgctgtattccggtgtttgacggatggccggtactttgtttacaaactcctgtatgcgttctcgctgagcacgtgtggccggggccgagggcttaacgtcaccttctgctgtcatgccgtagacatattgtgcggcacgtgagatcagagcgctggcgtttgcggcgctgcggtcttcgtcgtaggctttgaattcgcgcgaaagctcgaggtcaggggatacctcaagaaattgatttatagcttcgcgctgtgcttctgtggcactcacttccttataatgctcatcgtagttataaatgacggattcacgcgtcgcaatgtagttcaccagtccggctgcggcttcggcgacaaaggcgtactttgtggctttttcaccggtctgggcaatatgaaagtatcttgcgtttagaataagacgtgctccgtccataggcattcatctccttgtatagaaataaaaagagcagtcagatgactgctcgattttaccgagatttcaatataaaaagcggaagtacttccgctttttagcgtccaccggcgttaccgaacagtgcagatttgtgttctggggcgcggacggagagatgatagcgctccgcaccgcatttatagaggcaatgtcctcggttcggtgtctggatgatctcatattcccacggctgcacgtttattgtgcgctgaaactccgaaatatcgcagtttgcaccgggatgaaacagaaagctgtgggtcggaatagacatgagcggctttgtgtatgtgataacgctcgggttcagaaggtcttccacgttttgcgaaccgatgcaaacgccggattccttctttctgccacgcttcatgaagctgttgatgtaggtgattgccagacggtttttcacgaactcgtgaagctcatcgacaaagaggtcgcagctgccttcggtcagaaatttgtggctcatataggagaagatattcaggaacatagcgttcttcagattgtcgtttgtggtgagtgcatctttgacgcagaaatcgataaagtttgaattcggtatgttggtgtgcccgttaaagtatcgagacatagcgccgatgcaaataccgcgcaggccgaggccgacggatttgagcatttcgaggctgtacataacgggatgaccggctttagcggcaagtgcggcttcttcatcatagctttcgagcttttcttcgatgacgcggtagaggtcgctcaaaatcgggtaatcctcagaggtcagctttgtgaagtccgtgcggggtgtgatgccgcgacgtttataggtttcctctaacatgatctcgatgatgtcgagctgcgcactggaaaaatcctgataaacggaaaagaagtcccgcagataggcgatgtgctgcgataggcgattttgctttttaaaggcttccggggagtcatcaaattcattgatttcctgcgtcgggtcaatccatgttttcggctcgagcacgttgatgtagtatttgctgtccatcatatccagatacgtaccgccgaggtttttaaccaactctccatattcgttgtccgggtcgaggatatatacttttttgcccgccatgatgacgtttgtgatgatgagcttcatcaagtaagatttgccctcgccggagttgccgaggattaggatatgtccgttggttttgtcttcggcgcgccggtcaaaatctacaatgatgttgctgccgttctggtcacggccgatgtaaaatccgtttttgtcattcttgccggagtaggagaaaggaaacaggtttgcaacgctgcttgctgggaaaacacgctcaaattctgtgccgaaagcgttcttgccgttgggcttaacgctttcaaagccttgaagctgccgtaggtatagcttatccactaagattttatggtgcgttaggatgctttgcgtttcgatctgcttcgattgtaaacgctcgaggctgtctgcaatcagttcaatgaaaacggcgcagtacacaaaagtttctttcgtgcgctgtgtttcgcggatcatgcgggaaagcgtagtaagctgctcatcggcttcaatctgttcatgcagcttgtaggatgagcgtttttgcatatttgtgcggttttgggcacggtgaaagatctcatcgcgctctacggtcggcatatgacgtgtgtagatatgcagcgttataccgtcagattcaccgagctcgcgcagcaaagcgatttccggtgaatctttttcaacggtttctgcgtatgaacggatcgcccaaacgcagcgatacgtattgccgagaatgtaataccccggcgaacgtctgaaggagactacagagggcgcgattaaatctttgtaggatttgactttgcctgcttcaatttcctccggtgtaggcatttcagcctttttcttaaacagtggcattgttgacctccatatattgcattccgtcaaaatcgggaacatgctctgtgtaaatgtctccaacgtagtaaatagcaagcagacgcttgaagctgtcttttgttgcgatgcgagcgtgaaactggtgttcgcggatgagattaagggtttgcataatgctgcgccgagcgtcatccagacgatctgcacggtgacgcaggatcattgcaaactcgcggcttgtgctcatcgcgatgttgatttcatccagataagcgatttcttgcaagcagagctgctttaccatgggggattcggtggtttctgcgagatgtcggtagtaacgcttgttatcctcgtaattttgcgccgaggacatgcacagcatttgcagctcggcaacatctgaaagaatattttgaaggttgcggatttttgcaagtacctcactgcgaccaagaacagagatgttgtccggccgcagcataatgtaggtgtacagcataccgtcttcaccttcaatggctaccgcaccgttatctccgatttggaggggtacaaattgcttcagattcagcagttgttgcgttgccgattcctttttgtcgtttttcttgtttgatttcattttttgctccaatttaatatttaggctcgccccagaagtactcgagctggtctaaaaacagatagttgatatatctctgtatgactttaagcagtgattgattatcggttgtaaaagtcaacaccatatacagcagggttatcaacagcggaacccagacaaaagagaagaaaaagataagggtagagagcacaagccccactgcgatgataacaaggtttatacccgtccaaccgaaaaacaatgccttttcactgagattttccgggtagaaaaaatagttttgatcgtcgttcatgatgttttctccttatacgaattgcttgaccaacgacaccacggaggagacgttgtgtgcagcgttgccgagtgagaaccttgcggaagtatcgagaccgaacatttgcgcaatgcgcggtacttcggcagctacaagcagcaggccgagcgaaaaatacaggcttgaggaggctgcatcctgcatcatgataatggcgagcagatagagcaggttttgcacaaaagcagtaaagcacaaagctgcaacctgtttgcaccaacttccgaagccgtcggtatatccgcgtgcaagcgcaagcatgtgcattgatcctacacaaatttgcacgagaaggataccgccgcgtttgaggttggaaaagaaaatcttgaagattgcccacaccagaatgataagctgaataagcgcccaccagtcggcatttgaggaaagtgcggcatcggcgggatcggtggcttggaagccgtctgtaagctttttgaggaattcccaaattccgtttgcgattttaaccggtggcagtgtgccataaacagatttaaacatactttgcacagcgcctttgaccaaatcggttatgctgacggttgcgccgtccattgatccgacgaccacgctgcgcaccgtgccgtaaatatccatgcttgtttgaaacagcaaaataggaatacttgaaaaagtgagcagggcgactaaaagtcgcagcatgttcataccggttccggcaaagctgccgcctccaccggtctgataggaaacggcaaagtccattatagcaatggctgcgccggtcaatcccagcccccaagcaaacagggtaaagaaattcacaatagcttgtatgaattcgttgctgaagaagttgatggatagtccgtttacatcatcgagcatagtgagggcaacagaggtgagctgatagtacacatagtgataaatttcctcgagcgatgagcttgcaaacataggtcatcaccacccaatgacgctccacatccacgagggcgcggaaacaacaaccacaaggcaaataaacagaacgagcagtacgttccattgaatttctccgccgttatgacgatagtctctccacacgaaaacgcctttcacgacgaacgcgatgatgagcacgccggagataatatacatgataatatttccaatagctttcatttccggcttaacattgttgttaaaagcactttcgagtgcaccggagatcgtggcgacggtggatgccggtaaatgtgaaatagcgagaaaatagagctgatttaagatgttcataaagttacctcttttcttaatttacgttgacggtgcagcttgcggattgaccggtgctgcggctgtacacggtgacggtggccgagcctgtgcttacggccgtgatggtgacgccggaagtatcggaacctgagagagagacaacagcggagttgctgcacacccactgcgcacccatgctgtaaaaatcactaggtgctgcggcaatgttgatgcgccagctgtctccgggcaaaatatcgatgctgtatgtatcaagcgagatgttttgcacctccgggacgggagtgggttccggcgttgcctcaatgacctgcggccgaggcgtaggcgtgacctttggcgttggttttggcgttgttttgggttcttcagcagtgttttggttgcctgcttgcgaacccgatggccgactttcagtcgaaaaaccggaagtacttccggtttttgacgattctgccggtgcagaagtaggtgtcgacgtcggtgttggagccgaagtaggtgttggcgatggggtaggagatggtgttggcgtcggcacttcctcacgcaagacgattgtaacgggatcagctgacggttcattggaagaagtttcttgtccttcatttttaaatagagctgataccggcgaacgcccggtgcgattgacatcgacgacctgccatacaataccaccggcgaccaacacgataagcagtgtgccgatcacggcgagtttttttcttttttgcatttgctcatcctttcttttgaatttacaggttgcccgccggggttgcgaccggtcttcctgcattaaaaaagcctgctatccggcgatagtaggctttttcgctctgcatgggcaaaattgaattgaagacaaattaaatctggtatatactttatttaagaataacagacttttaagaacgggtgaaaacatgaattctgaattaatcaatgcgcttatttcgcaaattggaaatattgtggggattcctttagcagcagtacttgcggtttggcaagttaagaaaggttttaccagtaagagaaacgacgaggtgaacgaaaagtcatttggtttatgctgtgaactttttgatcttgtgagccgtaatgaaagttataataaagaagttacagataaaattacgaaaatggtaaaggagagaaacgatagccaaaagcttttgcatccggaaattttgcgtatgatttccgagattgaaacttataagaaaatactaaatagaattgatgaaaaggacaaattggcttgtcgtagagaaaagaaaataatgaagcgcttacgcaaagattatgaaatcttgtgtgcatatgtttctaatgaagataatagattgcgcaaagcattgggctatccacgagatacgctatattcctttcatgtactaagatatggttctgaggggccatttaaattgttcgtacatcttatggtagcagttttatttgtacttttcgaaatattgatctgtttcgtggtatcattaggaacgtcttggttaattggtattggatcgttgataggaagtgcagcacttgtaggacttgtaatagaaatttggcgcttttggaaaaacaaatcgccaaattctttctggagatttgtaaaggaacagaaacgtaaaattaaagaagaagaaaaagaaaatacataatagctacaaaaaggacaaaatagatcaccatacggataatcccggggagatcttcggaaagcgttttatcttctatgctaatatcgataatatgaattatgaaggtagcgacaacaagaacaaatagtatggttccaattggtatgccgaagtaaattattgagaggtttgagaatattagtagatgtaggtatagttttatgcaagtaatttttatcgctgtgatccattgaccttttcctcctaatcccatgtctattagccataaaacttcattaaagactgtacgagaaaaagtttgtattaagagcgctaagtgaacaaatggccacaaaatcagtagccatgcaaccacgtttccgcagtgtgccgatataaactcgaaaaattcctttgataccatgggattccttcctttaaaactaaattagcaggcctcgccggggttgcgaccggtcttcctgcattaaaaaaacctgctatccggcgatagtaggctttttcgctctgcatgggcttcttaaatatatattgatttataaactcgagtgcgctacaatatctatgataattcttcaaaatactatgattgtaggggtcgaggtaaaacatgaaaaatcaaattaaaaacgacttaaacaacattaaaaattcaggacaaatcgttataaataccgctatttcaaatgacaatggttctcgacaatatcgcgcaagcgatgtaattgaaaaagggaagtctactaactttatgaaacgtgaggaaatttttgctgttttgggagcagtagcttctggtgtcactattgtggattttctttttaaccgattaggtgaaaacgcagttttaaaacttgggaaaatactatatgaggcttttattgagcacaatacagctccctactacttcttaatcgcagaactgatagctataatttgttttggagctgtaagtttttcagcttttcggaacgtaattacgttacataaagcacggcatctaggcgcatgtatttacaatagagatcgaaaaaaatcctataaaataaaggcattaccatgcccacattgcaaaacaacttttcgaactccactaaaaatcaaagacggcaaaaactttggcatggaatttacttgccctcattgttcgtttagagctactatacctgttgcggatatactcaatcgcattgatgaaaattatgaaccaaaaaagtgataaagaattcccgtcgcgactaccattcctattataaggaaactcacataaaacccgacatcctttttcgctgttacggctttatcaagtaggaaaattaaaaatacaattaccgaaaccattgtcagtattgcaccgagtttaacatcaaagtaaaacatagaaagcagagcatatagcataatgcttgggtaaatatccatacaggatagctcaaaagctaccatccaaagaggtgtatcgctatcatgccctatcacctgtgatacaattttatactctcgaaataaatagcaaataaatcgaccaattataaaagtcagatgaaaaaatggcagtaaaaccagtagccatgcaactacgttcccgcagtgtgacgatataaatccaaaaaactcttttgataccatggggttccttcctttaaaactaaattagcaggccctgccggggtagcgaccggtcttcctgcattaaaaaaacctgctatccggcaatagtaggctttttcgctctgcatgggtaaaattgaattgaagacaaatcaaatctggtatagagcactgggggtgatttgtgtattctatgtgcatcgttgtttgaatttattttagtaattcccgaatcattagaatgaaagttatgagtgttccgagcgcgcagattatagctcctaataaatggatcgttcttttgcagccggtgaattcttgatttttataatcttaatggcggatacaacagcagctattgcacatattgcaattatggctgcgcagactaattcaaatttgagatggcggagctgcgattccgggtcaagcggaagcaaaaattgagtttcttgattttcttcagagcaactgatagtcgagtcaatatttgtgcttgaggtatcggtatcagcggccataacaggtgtgcgtaaagaaattagtaaaattagtagcattatgatagcttttatttgcttactcataaagtagatgtacctcctcattaacattgcacatagagcgctcgggatggtccgggcgctcttgctttttgcaatgctatttaaaacttatctgctctttttgcggcgaaccagaagtacggtagtcaaacctaaagcagaaccggcaaaagcaatgtagggaagaacactgcggctgctgccggtcttcgggcggttaggaacagggctattggggaagtccttgcccgggattgtttcaaacgtcacgatctggccgtcttctgtgatagagaacgggtagtagatcgtatcgcgcacgaagtttgccggagcctgtgcttcgtaaatcaggtattttccgtaaacaaggttggagagggaatagaagccggtttctatttcatccatacggccgatgagcgtatctacaccctctgtgtagcggccatcaccgtctgcatcgcggtagatttcaaacactgcaccggaaagcttgtgctgcgggttggtagcatccacctttgtggtggtgacagtgcctttgatcggcttgttcgggaaatctttgccgggaacagtctcaaagtttacgatttgcccgtcttctttaatctcaaacggatagtagatgttgtcctgtacgaagccctcaggagccttgtcctcgtgtaggaagaattttccgtaagggagggaatccagcgtataaacgccggtgtcgccttcctgaagcgtgccaacgagcttatcggtcttagcgttgaagatgccgtcaccgtctgcatcggagtaaacgccgaacgtcgcgccggagattttatctgtcgggtcgtctgcgtttaccttggtggtcataatggagccatgcagcggcagaatcttcaccgtctgaccctcatcttcgatgtctgcatgtactgcaatttcaataccgtcgcgataaagcgtttcaaaaactacgacctcggtttcggccgtcagctcacgcgcgtcgaaagtaaacgtcatctcaacttcgccggtggtagcttttggcgtaaaggtagcttctgccgtgatttctttaccatcgatgagcagcttatcattcgtggctttgttcatcagcacaccggtaagcttatattctttaccgggggtcaaatccttatagctcacaacatcggtaatcgtgatcttatccgctgtaatttcctttttgccgtctgctgttgcctttgttccgatttcaggattcttaatctttaccgtctgcccttcatcgttgatgtctgcatgggtagcaagcagcacgttctcacggtacaaatcctcgaacacgacgatctctttgccatgcaagcccgttgcatcgaagataaacgtaacgtctacgctgccgtttttggtttccggcacaaatacggtttcagctgtaatttctttgccgtcaacaagcagcttctcaccggtttctttatccatcagtacgccggttactttgtactctttaccgggaacaaggccagtgtatgataccgtatcggtcagcgtaactttatcgagcggatcaacttctttttctccctcaacggtagctttcgtaccgatttcaatcggcacattatggaagcttacagaagcaatttcgccctcactgagctccacgatttgcgggtcgggaagctgataaccgtaggtttcctttgtatcgagttcttccacgcggtactgatacttggtcgcgccgtctttgtccgcgtaaatcgggagcgtttcggtaaggatttcgcctacagcattcgttacatactctgcggaatagttatcctcaaggcgcgtcacgcggaacttgatgccctcgattacgccatcctcggaagtctttacgattttgagctgtgcgtttttctgcgtattaacgagatcatagctataaaccttgccatcctcggagattacaacatcgaagtcgctgacgagctggcgaccattgccgcccttgctctggtgcacgacgtatgtgccgtaaggtaaatcctttgtggttgctatgccatccgcgccggtggtgatatggtcgcgctcggtctctttggctgcatcgaagctgcccgcagatttgaggtaaacatcaaactctgcaccctgttcttctgcgaggtcatcaagggtttcatattgcttatgcagcgcaatctggcctttcatgacttcttcggtaaaatcttctggaattaaatcatattccagttctttggtatcggttgttgtgatgtatgtatgaactttgctgtctaacttataacccagtggaacgccgatttcctcgacggttactaaaacgccgatgggaatgtttctgagtactgcctgtcctgatttgttcgttgttacgatgttttcaattttttcatcgttattcgtataggttatacggtactgagccccttctaatgttgcgtcgccttgcggaacattagaatttgtatctgcatctttttttcttacggtaaggcgaatttttgtagggtcatccacaacatcaagattggcactcttaccattgatactgaacctgtgtacgtttttatctaatgtgtatcctaacggggccacctgctcaatcgttacgtagtcaccattttcaagcttacgagaaagtgttgccttgccgtttgcgtctgtcgtgaacgttgcaataacggggtcatttgcgtagtcgtgattgggatttacatacgctttataaacgttgtaaacagcaccttcgagcgaataatttgcgttgccgtttgtgatttttacatcggcgctggttttggtcagtgtcaccgtatatttaggcttttcgccctttatcttgatatatgccatggtctgcgttgtgcccgggcaggtcgcttggtgctgaatattggcctgatggtctctgtcctcccaaacggcgatgctgtttttatcgccgacggtgtagcctgcaccgataatcgtggtctcttgctccggcagcgtgctcgcagatattgtcagcgtattgccgttacgggaaatatcaaagcctgctttttgaaaatcaaataaatccagcacgccgttggtatcggtaacggtggccttatatttgccattcacgagctgcaaagcgatttcttgtgcatcgctgccgtcgctgcttttgcctgcaaaggacgggacgatttccgaccgcaaaagacgatctttaagttctgcgtagtaactgcgtacaacagaaccgttatatgccagatttgccatgcgctcaacatcggtatcgatgccagaaccccaagaccagtttgtcccgtctacggtaatatagccttcggacgccagccaaacaaggtgctgtgtgaccatcgtctttgcggtcgcatcgctgtaccaatcatttttaccgagagagtttgtcgtgttgtagccataagcgataatgcggcgcatagcttcggtcataccgaaattatcccgctgcacataagcaccgttattgactctgcctttaccatgctgcaaacagtaggccggataacttacaccgtttcggtagatgtcatacagtggaaattcgccaaggtcataaagataatttgaactgaaattaccgttgatgcctaccgtgcggtaacgcgtaaccgcctcatcgccgagcgctaatagactgatttcatcctccgggtttggcgtgggggaagcagtgggttcagccgttgcttccggctctgcactggtctccggttcagtcggttcctctgttgcctccggtgagggcactgctgtcggttcggccgagggggttgtgcttgcctccggcgttgcggtcggttctgctgtgatttccggtttgggttctgcatccggctccgtgtcctgcgctgctttttcagcgtttgtttcgaccgtaaccgatacgggtgtatcggcctcatcggcaagagcgctcatcggtacggcgctgaaaatcagcagcgttgcaagcagacacgcaagtgactttttgagtttctttttcatttttttgcttcctttcaaagatttttctatatgaaaaaagccgtatataaaatgacacggcttgaatttgagcagtaaaaaagcactcaatgtaaaatcgagtgcttcattctgcaatattcactttatttgatccttatctatattcccaatggccaacttcgtcttgcgcgggaatgtccacaacccaatatttctctcctgtataatgtttatacatctcgccggatgtcattgtgtaacttccgtgatcgtttcccaactcccactcatagtctgaatgtgactcaaattcatcaacagtgctgaattgtgtgccgcaagcattgcactgatacacccaatcgctgcccatccaataatctttttcccagtgtccgacttcttcgcgagccggggtatccaccacccagaccttttccttgggcttcggcgtcgcagtgggcacggctgttggtgctgcggtaggagctgccgtaggcttagctgtcggagctgcggtgggtgcagctgtcggcttcgcagtcggtgcgggcgtaggtctggccgcactgccggaaggcttgctgttagaagtatgggagctgctcggttttgcggttgctgccggtttcggtgtagccgtcacgctcgctttacctgccgtgctgctttcggttttactctccggcttcggcgttgcggtaggcttgaccgttgccgcagcaccggcagagggagtagccgtaggcttcgccgatgcactcggcttggcgctgcttgcggccgtggagcttgtgttcgaaaccggcttgctgctcactgcactggatgcagagctttcaacgccggtatccgctgtactgttgcccgcacacgccgccatggtaagcatcaatgctgctgtcattaaaatagctgtgattttctttttcatgtaaatcagctcctcagttaaattatagcgcgagactttcttcaaatcaagtatgcaaaagcaggtgctgaattatcggcacttgcttacgctgcgtatgggagatattttattttacattgcggtgtttgcgataaataataacgctcatagccgctgcggagatcatcaagatcatgattgcagcataaacgaccgagttgtcactgccggttttcggcatggaagatgtcggcgtaggcgttgctgtgggcgctgccgtaggcgttgctgtaggaaccgctgtgggtgctgccgtaggtgctgccgtaggtgttgccgtaggtgttgccgtgggtgttgccgtgggtgctgccgtaggtgccgccgtgggtgctgccgtaggtgctgccgtaggtgctgccgtaggtgctgccgtaggtgccggtgttgctgtgctctcgggcttttcttccagctctccgtcagacgtgtatacataggttttatcttcgatgatggaagcattgaagctatcggacagcacttcgccgtcttcgtcgatctcacgcacggtatatgtgccgtaagggagaagcttcgtaagtgccgtgccattctcatcgacggttacgatgtcacgctcggtttcttttgcatcgttgtagcttccggcggatgcaaggtaaacctcgaatttgcgatcctgtgcgtcaagcgtatcgagcgacagcaccgcaatgtcagactgcgtttttatagcaatcttacctttgataacttcatctctgagactgaaattgtcaagaacaaaaggttcttcattaccgccggatgtgatattatacgtgtgtacaatcgggtccagcttgtagccggtcggcgctgtgatttcctgcacacggatttgtccgaaaggcatattttccaccatagcaaaaccggtttcgtcggtcgtaatgtcgctataggtttcacctgtaccctgcggatagtatacgcgataaactgcgccgccaagcgttgcatcaccggctgctgcgccgtaatcacggtcgtttttgtagattttcatggtaatcgaactgggctttactgtagcggttaagagaacatccttatccgtgattccaaaaacgtaatgattccgatcgtagcgataccccgttgctcttgtgcgcataatcgcaacataatttccgcccggcaatccaccaggaacctcgcagtaaccgtttgcatctgtagcttgcgttgttgcgtatggctcctgttcccaatacgaataattgtccggatcggctacatccttgtaaatgtcgtacacagagccctcaaggctgtaatacggattactgtccgtgaaatccgtttctgagtcagtcaactgaatagccactttgtaacgcggttcgtctgtggtttctccgtcagaagtctcatccgcaaatacacctgtcggcataataccgcagatcaacagaacggccagaagacacgcaaacgcttttttcatcttcatgattttacttcctctcgctttgattttatttcagctgcataaagtgcaacttttgtctgaaattgaatatatctttatcgttattttaatactatcataaaatcatttcgataacaagtgataattaaattttcatttcttttacatgccgataaaacgtgctgcttgtaagtcctgtaagtctctgtgcctctacggctgtaatttcgtgagcacgccattttacacagacttgcagaaactgtttcttgtcgacttgcactttcggccgcccggtgatccgaccttcctgcatcgcaatgcggcgcccttcttcagtacgctgccggatgcaatcgcgctcaagctgcgccaatgctccgaatacggtcagcataaattgaccttgcggggtagaggtgtcgattgactccttcagactttggaaagcaacacctttcttttgcagctcgtctataatggtaagtagatcgcgcgtgttgcgtgcaattctggatatatccgaacagatgactttatcaccttcccgggcgaagcttatcatagcttcaagctgcggacgatctctgtttttgccggatgctttatctatgtagatcttctctgcatggcaagcatgtgcatctcccagctgtcgcgcctcgttttgctctgcggtagaacaccgggcatagaaaataatcattgaatacctccctaaccaaaaacgtgccaaaagataccaaatagttttgctacatttcaaaactacaaaagtatatcttttgacacatgaatatacattgaatcaaaaggtataacttttgaaacagttcattcttgacattccctcacaggtcgtttatacttgtagatagaaagagtgctgccgatgaacggttagccctcagtgttactcaaagaaatgagccgacgactttgggaagtatgggcggctcatttcttttttatgtagatgaggatttgaacgatcaatcctgcggtcatgatgactaaagataagatttcaaaatcactcatggtatcatccctctctccgtgtcggattgagggatttttcatattcaagaaacgtccctcacacggtgcggaaaatccgcatctgagggccaaaccgtccaccgttttatggcagcacccgaaccgcatattgcagttcgtttttattctaccagaaatcaccttatatggcaatgtttttattcgacactcacggccaccagtttgcagtttagcgcggctgctatccgcagcagtgcccggagctgtaccatgtgctttttctgctccatgagtgcaacctccgtccacgaaactccggcggcagaagctaattcgcgctgcgatattttaagtgcttgccgctgtaaaatcaggctatcaatcagctctatataagcgtttggcattctatcacttcctttcagaaccggcaatgtttccggttttctttttttgtctgcggcggatcaatgtgagctccatttcgggcattctccgcacttggtcagctcgaaaatataccgcctcagaccaagagcgattgcagtacatgagttcgccctcgttctctacgggacaatatcctcgcttgcgccattgcttctccgtggtgatttgggctttctcctcctccgataactcattataaactctgtatttcgttgccattttgtttcacctcgttttttaaaacatctctcagaacttgcgcgatcgtaactgcatccacacgcggcatatttcgcacgagaagtctatcaacgatccatgctgactcattcaagttttcgatttccgggagggctatgccgtagttcggcacggatatgtaatacgtaatcgttttgccgactaagggtaggttttccatgatttttgcaataacaactgtaatacttgagcgcgatttaatacgcacaatttgtgcgtctctgttaccttgtacggtatattctgcgttccatgtttctgttgatgttctaattaacatcattactgcacgctcctttgttcagaaccggcaatgttgccggttttctttttttgtctgcggcggattagcaagatcaacagcagcaacagcatcgccgcaaaggaagttatgaggccgattgcaagcccttccgcatatttttctatccacgtgctgccctccggcactgccttttcttcgacttctgctatcgcttcttcggccatttccactctgtggccgcgcacaagcaatctgtgcgtattcacgccatacggtgtgcaggtgagtagcgtcacataatcttgctgcgtatcgatacggatcaaatcaatgtctgtgggctccaccactgcgatgttgtccacttcgtaagctaatttctggttgcacaccgtgatgaagaacatatctccaagcttaagcttatcgaggtcggtaaaaagctttgcgcttgccatgccggagtgtgcggagatcacggcgtgtgtgccgataccgcctaccggcagcgacgtgccttccatgtggcccgcgcccttttccatcgccgtaccggtcgtgccgtggtatataggcaggtctatgttaatggtcggtatttctatgtagcccataatgccgttattggcaaggttcaggagatcttcgtatggcggcaggtcggctttgattttatcgacatcttcaatttgcacggtagagattgttttgttatactcccgtgctgccgccaacgctgcatcgatttccgaggtgtcgagctgctgaagcttttccgcatattctgtctgtacaagcgactgcgtgtgctcattgttaatcgatgcaattaacgggtaagcagctgcacccgcaccgagcaggatcacaattataaaacagataatgatgatggtgtttttgcgtttgctcattttttgatccctccaatctttttagcgactacgatcagcctgccgttatcgctgctgtattcgcatgtcgataaggtaattagcttatctccatattcagcgtcaatgcccgtatcatacaaagcgcgctgcttacattcctgtacgtatgtattaaaggttaattcgttgttttccacgtagttatagtattgaaaactgtctgcttgataggccgttgtgatgacaaccgccatgacctcatatagtcccagctcgtctaatgtgtcaaaacgcacgtatttgtgctgctgaaagaattttctctttttatagagctcaagatcgctgaacatcccgccatcaagcatgtggtggccgtaaattatcaagttatcgcacgtgcgtatatcgcagttttcctgtaaatacggcgtgccgaggttgctgtacgctttctcaaaatttcgacgcaaataataattagggctatccggcgactgcatcaccgggtaattgatctctgtgcccggcacgcgtatccagcctacaaaatcggaattgtagttgtgcagttccccataaacttcaagcagctgcgccacccgtttatcttccaccgtgctaatttgctctaagtctcccaattcgttttccgctgcgtctactttttcggctatggttgcaaacagttccttttgctctgctttttgctgttggttatcaataagcagatacgcgcaaaatcccgcgacgcacagcagtaaaatcgcgatgatgatggctatgatctgcgcacctttgtgcgttcgcttttggggcatgttttcaccttcttaaagaaaatttaaagagatattctttatctttacttgatttttgctttatgtttgcatataatatagttgaaaggaggcatgaataatgtctgatatggttaatgtaaatttcaaacttgatgctgaaacaaagcgaggtatggaacaagcttgtaaagatatgggactatctttatcggcagcatttactgtgtttgccaagaaagtcagccgagagaaacgtatcccgtttgaactttccgttgatcctttttactcggaaagcaatatgcgctacttggaagaaaagatggcagcgtataaagctggaacacttaaatttgcagaacacgagttgatagaggattgattatgccaattaaagtaatacaatgggatttagatgcttgggaagattatctttactggcaatcgcaggacaagaaaaatcttaaaaagataaataaactcttgaaagatataagtcgcaatccatttgaaggcattggaaaacctgagcctttaaaagaaaatctcacaggtttttggagtaggcgaattgatgaagaacatcgacttgtttacgctgtcgaagatgagagagttataatctttgcttgtagaggacactatgatgattgattagaggacgggaaaccgtcctcttttccttttcacccaaagcctacacacaatttgcaggctttgggtggggctcagtgctgccactgagccctccctgcgaggtaaacctaattcaaaatttgggtgtattcttacttatcttcctgctcttttcttttcttgaacacaaggaagaagataaacgcggaagtgccgaggcagaagacgagaacgccgccgatagcaagcgcccatgtgccgttttcaccggtcataggagtctcaaagccacgcgtatttacaacctgcagcggagcgattgcgttcttggaacccgcatccatctcatcgtcgagcatcgtgacgtcgttgccgtcaaccgttgcagatgcagtctgatagttgtgagccaaccgcttctgcgggatgttggcgagcttataatcttcattgttcgggaagttgtagcgcgggtcgttctggataacaccgagtgtatctttgctgtaaatgtcgcacgggcggtttgcatcatcgacggacgtaatcgttacgtcgatattattcttgagcagcgtgtagccgtttgcagtctcgagctctgtccagatgtactggtcgtcctcaacgcctttaaggatgatctggccctttttgccattccattcgacggggtgcattgctgttgcagaggcttctttgtccgtgtgtccggtaacataccagatgccctcgtcctcattaagctgtgcaattacatagtagccatcggacgcattctgcgctttaaagaggacgttatcgaacatcgtctgttcttctttaccgtcgctaaaggttttcgtgatgttcgtcgcatacgtgtaaatatgcgcgtcgtcgataagggtgtcgtagtaggtgtcattggtacgcttccatgtgaggacgacttcgtttttgtttccgttgtcaccgtaaaccagagactcatcagaattgagttttgcgtcgtaacggatacgaagtgtgtaattgctgtaacctgcatagagcttgccgttatcgttatcgtaagccgtattggctgtgttgatctcggcaaggccatcatcggtcatggagatcgtcatcgtatgcgtaccgtcgttgttttcttcgcgcgtaactttgaatttgccgtcggactgcttccacgtggtaactttgttggtgcaatttgcatcggtaaagaattcgagtgtaacgctgttcgtgccgcctacataagagaggccgcgggccagaacatcttggaacgtatacacgctgatattggtggccgcagacgtgatcgtcggcagtgtggagatgatctgatattctacggtgtcgcctgcggatgccgttgcgttgtgtgtaaagccgtcggtgataacatcagatgcgttatttatgccagtgtcttttgcagcttcacgcacggttttttccagtgtgacaatacccgtttcgtttttggggtagaggacaacattgtagttccaatcttgaccgccggtcgtaatctggttgccggaaccgtctgccataccaccgtcaacagtggtcatcgggagactgacaaagcacggatttgttgtacctgtcaccatttccggtgtgcgggtttcaaccagcagatagagacctacggggaggccggttacgttgctgtagccgtcctcgttcgtttcgggcattgccgtaccgccgttgttttttacgtaggcttcgagcgaattcttaacagtcgtggaattggcttcaagagcagctttaagtgctgcactaagtacgtcggactggtaataccagttgtttgcatcaagtgcatttgcgttttcatagctgtttttgccgtctgcaaggccgatagcagcgagcatatctgcgcctttgactttatcgattgcatacagcacctcaatgtggctgtcggtacgaccgccgtctttttcggactccgtgaactgcgtgatgtccgcaattttgaggtaagtatactcgacacctttaattgcatagccgttgcttgcctgtccattaccaagtgcagaagatgcgctgttcgcaccggtacgcgttgtgccaccaagcacttcatttacttttgcgtcatactggccggtagaaacgtagctgtcctcattccacacgccatcttttttggcgttcgtaaagtcatacttataaatggacagctgtgcctttgcgtccatatcgatagtagctttatcgatagtagccgccgaggccgagatcagagaggtgcaggccagagctgttgctaaagccaaagcaccaatgcgagagagtaatttggattttgccatttttctacattcctttcattttattttgttttattttgagagagtgtagatgctctcttaaaatagctttttcttccgcagccatgttgcaaggcaagatgcggaaatcagtgcgagagcaatgccaatcggcacgctcgtcatgccgttgtcgccagaagacggcagcgtgtagttttgattgttgaccgccgttacagtcacatcgacgatttctgttccgtcgtcgagcacctgcggtaagctgccgataaacatcggcgctgcgagcagagtgttgccggacttagtggcggtttctgtcagtcggtaaaagatcgtcacagtctgattattgatctgaagcccattaaaggtagcgacgccgttttcatcggtctccaaagtgccgtcaataacagcactcgtgcagccaccgattgaaggcttgctgtcttccgcgcgggcttctatcggagcccaagtcgcgccatcgtcagtgctgtactcgagcgtaaactctacgcccggcatgggatttccgttggcatcgacttttttagccgtaatggagcccacactcggagtgttttcctgcgtgatctcaattacctgctcatcgtgctcgattgcaaaatcatgcacggtatcgtcaaggtcatagcccttcggagccatcacctctgaccagtggtattgtccgtaaaggatcgattctaccttgatttttccgtccggcccggaagtttcggttgcaattacattgccgttatcgtctgtaatctcaaacttcgcgccttcaagcggcgtcacaccgtcatggtctactttaaggatttcaagcgtgccgcgtgcaatttggttgtaaaaactaacctctgccgtctgcccataggtaagtgttaccgtctgtgcatccggcgtgcgatatttatccggcacgttgatttcttcgaccttgtactcatacagctgcgttgcatctgcatcgacgtatacaggcatctgatctgtaatgatctcaccggccgcattggtggtatacgttttgctatacccatccgagagtcgcgtgaccttgaatgtaaaaccggcaacattgccgtcttcggaggccttcacgattttgagcggcgcatacttgagctcgttcgtgagtgtcacctcatacgttttgccgttttcgtggacgtcaacatccatgtctttaaactcacgccccggcacacctttgacctgatgcagcgtatacgtgccgtagggcaggtctttggtggtcgccttgccgtccgccccggttacaagataatctcgttctgtatcctttgcggcatcgtagctgcctgcgctcttgagatacacctgatattcagcgccttgctcaagctgtgcgtctgcaccgagcatttcaatctgtttggtaatccggatgcgtcctttaaagacatcttcggtgaaatcttcgggttcgaggtcatattcaattttctctgttttggttgttgtaacgtaggtgtgcacacgggaatccaacttgtatcctgctggggctgtaatttcttgtacagttacagtcacaccaatcggaagacctctaagcgttgcagaccccgagctattcgtcgtaacctctagggtttcgtactgcttgtgtatctggattttgcctttgatgacttgctctttaacgccgattggaatctggttatgctccagcgtatacttgtccggttcagcgccgaccgggtatttcgtagtatccaagaggtatccgctggacggcgaaatctcctgaatataccagttatccccgcatacgtactctttcgtcgtgaactggccgctggcgtttgtggtgtactggtcaatgagatcgctgccgtgatacacgccgtacactgcaccggcaatggaggcatcgccctgtgcggctccggtttccgcgtccacctttgtgatggttgctttccactttttgagcacgttcgagaagcttaccgttgctgtttcgttggctttaaccgtgaccgtctgagactttggctgcacgtactgatcgggcacatcaagctcggtcaccgtgtagctgccggccttcaggtttggaacaatgattgtgccgtctgtaccagtctgcacagttgtgtccacgccgttacccgtcacgcggaaccgtacaccggaaaccttgccatcctctgaggtcttgacgatcttcatagagccgtcaagctcgactttaacattaaaagttacggaggtagggtctctgccagcaaagccacaggtagcaacatcctggctaactgcgtgttcataataataaccgggttcatctttataatagttgagatccacattgtaggcaaaagatacgattcctgtaggattaggatttccagttgcagtaagtataaccttattgccttgtttcgtcacagatatacccgtagtgtttacaaggggagtatccctataactggctagagcaccggtagtatctgtaagagtctcggactcaccgactttcagcgtcacggtttgacctgaaatgctcggctttgtgtagaactggtctactttcgcgagaacagcttttttaaatccgttgtaagtagactgtgaagcaatgttcgccatgccgcctatcgaactctgaatcgatacgctcgaagcacccacaaagtcgcctccgaagctgttgattgtctcccaaatcagcagctggcagtaaaactcagtcaagtattcagcggacacttcgatggtatcccaattgtagtttacagcactgcaccctttgatattggcaatgtttttataacgtccccaatagtcgatgagcgtaagtttgttaagttgctctttagtcaattctcgggatgtatagccgccgttgtctcccaaaccgagggcaatgccatgctctacacaataagcgacttttccgttaatgcgttttccgccccatccgtttgtcgttccctcaatatttgtcgtatacccgatgttcatcaggtaagtggaacgtggctcggataccgtgacgttcgccgcgtaaaatacaggccgattcagcccggcttctgcttcgatctctgcgagaggcttgtcaatggcttcacggccatctaacgtacgcagctgccc

SEQ ID NO: 15 - DNA, 521928 bp, Intestinicoccus colisanans
  source 1..521928: mol_type = genomic DNA
tcgtcaagctgcaatttcccgccgtttttcagcgattttaagtacagcttcaagaggatattggagtataaaatcccgtctttcatatcttccagcagcacaatggagtcgctgtcaaaaaagttctctttcagcttgaggtagtaatatttgcggttatctgccattgtccctgtcctcctttttccggcgtttggagtagtagtgggggcagagtatgataatcgcccggaagctctgcttgcagctatgggtacagccccggcagaggtcattgtatgtgatacggtcgcaggtggaattcccgactttcacttgccgcaggaaaaaagaccattccagccgccgtttcttgctcattcttggcatgggtgcgctcctttctgccgtttccgctggtgtgacggtatcggcggtaattctgtatcatctcggtatcattttcggggtttttctgccctataagcccgtcaaaaaatcctttggtatttgcggatagggtacggggcagcccccttgttctgtataggttcgggtacattttggggcggtttttatcgttcctgttcctgccttttcacaggcttgcgctcccggtgtaaaatctggtcgatattgcccttgacagtctgtaagcggcggtattcctcccgttttgcccggtaatcgttgtagccgctgtttttctcttggataagggtttcaatctctgcttgcatggctttatagctcggcagcttggaaatgccgttctccctgaaatagcgggcggctgcgtctgctatgataaagtcgctttcgtacttctgacggtaggctgcttttgctttggcgtttttctgctgtttcagcccgtcccggacagggcgggtcttggaataggcaagcacctgtcgttgcagctcctttttcccgttcagcgtcttttccacctgcttcagctctgcaaggctttcctgcatggcggcataggcggcagaacaggcttcgtccagttcctccggggaagaaaagccgtactgctgataggcggtaacggtagccgccatctgctttaggttgtgctttgccgcccaacggtcatagcccacgcctttgccctcggctcgtttggcttcccggtcaaccatgcgctgcaaggtgttgtctgccggggtggtttttgcggttttttccccttgtgacggctttttagctgcggcagggtattcgggtatggctttggtctgttcggcggctctgttggcgttctgcgtaagcagggcaaggacagcagccttgtcaaaatcgtcccccagcttccgggctgtgataggcttcgtcctgtccggcgtgaggtaggaaaaccgcccccggctctccttgacggtcacgccctcccgcagcaaaagggaagaaaactcatcaaagctgccagcttgggaaagtgcctgccgtatcgtccggcgcagcttcgccttgtccgtttcaaacttggttggcttggtcggctgtcctgcggcttctctgacagcgttctctttatcaagggcaagctgccctttctttgccgcccagtattcccgttccgttatccgttccttgctgccgtttaggaggtcgatttggtaaagcccctcccggtggcacatctccatgacttcactcttgaaatattccatagcggcgttggtgcagcggtgcttgcagcccgcccttgtgtcggctggtctgtccatgtagggcagaagcgtgacttcataaatccgcagggagttgatgacgatatgcacatggatattgccgctgtggttatgcccgtccgggtgggtgcatacaagggcttggtgtccggggaaatgctctttacagaacttctcgcccagctcctgcgcatggtctacggtcaagccgttgtctgtcccgtcccgtgggtcaaagctgatgatatagtggtggcttttcacatcttcccgtttttggtttttctcatagcggagattagcccgcatacaggcaacagcgaaatcctcgcccccgcagttaagggaagaaatgcggtaatcctccctcggtatcagccgcccgttttcatcaagggtgggcttcatggtaaactcgtcatgctcaaatgtgaggtaggcttccgctgcgccatagtccgcatttttagagctgatatgtttgaatgttgccaacagcgtcacccactttctgcaagacttcaaactttagggcagcaaggtcggaaaccgccgcccgtacctccccggcaagctgcgggtaggggctgtgccactcgttcagcgtccgggctatctggtttaagttgccgccgatcctgccgtattcggcggtcagcttcccaacagcggcaagcagctcatcattgacgggagaaacggttatgatggggcgtatggctgccccggttatggcttgccggataaactcggcttggctcatgttgtaggcagaaagcctttctgcaaactcggcgtattcttcctcggtcatgcgtgttttgactacccggctgcggtgcggtgtgttgtatcgttttcgcatggtaaaacctcctttcgactgccgcatggctgcggcgggataagcggcgtaagccgcatggcagggtttggggaaggcactccccaacaagattcccgcaggggcaaaatgagcgataagcgaattttggtactgcggtagaatcttgctctaaaaaactaccgctttcctcggcggctctggtttgcggatatactggcttgctccaccaatatagcgattgcggcggcgtgttctgcccgctgttcaccactacaacggtgaaaagggggcgttttggcaaacgcagcggaaatttttttgttttccctgtctgctccctacaacaatccggcggtgtggtttgccaaagatttttgaaaatgggcgcaaaaaaagcagtaaaccttttcaagatttactgcttatctgccgctgtgatgggcggcggtattaaattgtcagccgtttttcaaatggaacttatctgcaatcgctttctttctgctttccaattccttttctgtaatcttccataatcctaatgcaatgatctgctatcttttgcattccgagttcttcaaaaaaggcaatttgtattttcatcagttcttcacaaacagtcaacttctgctcatccatattgctaatagcaagccatgggaacgctttatatttcttagtgtccccaatgagaaaattgtaccctatcaactcattttcacggaaaacgaaatagaattgtgggcctgaacctggaactgacttttccataatttgctgcattgttttcacgccgccgtatgccggaaaaaaacctattcgctcaagagcatttaatatgtcaatccttttatctgtgggtatgtctctataattgataatctgttccatttgctctactctcattgaagtttaatttgtcaggctctaattatacaacttttctgtttagcggtcaaagcggaacttcaacaggctttctatcagttgcctgacgatatgctcctgcatatccgtgttaatctgtccgtccattttcgcacaagagcggatatatcctgcataatgggataggacggcggcaacagcttccgggtcgccctcgcttgccttaacgattgtctcatagggaagtagctggttcataggacaagccctccaactctgcccgtagccgccgtaaaatcatctgaatacgccgcccggttgtgttgccagcccgtccatatctccgtccaatctccctatgcgtcaatcgttggaagtagtacaagaaaatgatttcctgttccatctgtgatagtgcggacagggctgcggcaagctctggactttccaaaagcaccatctgaccacagacgaaaagcggatagctggtcatgccggattgctccgcaaagtatttatctgtggtactgaatggatagtgtttttcttctatcagatattcaagcgagatttcccgcttgcggtggctccgtatgctccgggctgcgtctatggcagcgtggcgaataacagtcttgcaaaaggcatcgtgtgtatgccggatatgttcttgatacttttcgtgttcggtcatggaaaatccccctttctgaataatggcagagggcggcagcatcttgtgctgtcgccctcttgattaccgaacagcaaagacgggcggggctgtcaacggcggcgcatttgcgccgttcatcttgaccgttgacaggctcggctgggtttgctatctgctcacggcaattcactctcattgataggaattgcttcaagttccgtattcaaattgttccaataagagccaatatccgcacttgtgaaatacttaaaaccgcctgcttctgacttcaattcgccgtttttaactccatagcaggcgtaaatcaaatcgtagcttgttccatctgagaggttaaatctaaagctggtcacatctgctccggcagtttcctcagttgttttgtcttttaaggataagcccttgaacttatcatacagggtctttatatcattttcagcaacaactactttcttttctgctgatgcaggcactccgtcatagtggtacatttcaacgctttcgacatcttcaacctcaaatgggaagtcgattttgacaggctcataagcaatgtttataggtaacagaaagagagctgcaaaaattgcaatgatacaaagagcgatggaaacgagaacagcaatcgttatcttttttctgcctctctgcttttcttttgcctcatggcgcataataacgctttcgctttcttcgtgaagaacatcttcgttcgtgtgagaaagcaatttctgataaattgcgttacagtcagcacaggcgttcaaatgctcttttaccatctctgcgcttgcttcgctgcaagcaccgtcaacatacagcggaagaatatctcgaacaatatcgcattgtttactcatgcttttcatccatcctttcttgaatttttagctttgcacgatgataagtaactctcgcccatgattctgtttttccaaaaattgcagcgatttgtgaaaaagatagttccccgaatacgcgaagctgaaagacttctttgtatggttcttccaaacggtgaagaacgaggtgtatgcggaacgccatgtcagaatctgcaactgagttctcaacattttcatttgatggcaagtcattgatttcactcacatcagctactcgctgacggcttcgcatttcatcatggtaaaggttttttgctatggagcagagccatgtcaattcatctgacttacctttgaattgtgatgttgtagaaacagccttatagaatgtgttctgcgtgatttcctctgctatctcacgatttttggcaagagaaatagtatacgagtatacctgtaaatagtaggctttatagagcttttcatagtccatacttgtcatcacctccttcagcttcataggttagacggagaaatcggaatttcgttacaaagaagtttgaaatttttatacctttacgctactcttgctttctgcggactattggtagacgcgcattaacggcaagtaaagagattgctgtgtcagcttgatatgttcaaatgctaattaagtatagcatacagctatgaatttttctattgcgttcccctgacttcggaatagtggcagggctggctatccttgttttgctttgtgcttctctaccgtacatgagcattggaagcagggttgtcctggccgtaaccttccagaaggttgataacgccccagataccaagacctgcgcccagggccaccacgagagtctgcaaaacaccaactgcgctgttgaaaaattccataaaataatcctcctaaaaaatgtttttgattttgggttaagttgttgcgtcaatctcgtacacatcgaaggtgtccgtgggttttaccacggcacgctgcttcttcatgtaccgttccatgtcaaagacatttttagggtcggcgtcggccgtgtatctgtaattcggatgccgggtgaggtcgtacttgtcagaaaggaacgggcgcacgccccgcagcatgaagatacacttgccgccgtccatcactgccaattcgtcctgagtcatcaactctttgccacattgtcaagtgatgaattcaagaaaacggcagccgcaaagaaaaatctttgtggctgccgttctaattggcggcttgaagcaaaaaaatccccggttgtaccagggaaataaaaactttagtatagcctaaaagagaaagctagcgccttgaggcgcggccaagtagagtgggcttaaagcctgcgtcccgagccacccgttttacgggtggcagcgactccttgtctgtttatcttatacttgtcaatttatattatccaataatgtgaattataatatgacagtacggatgcatattatagaaacataactttgaaagaatcaagcataacctgtggagtgactcttcaacggataaactattttcacttcatacagttccgacatatggaataaggaacaccaatcgccctcaatacaactttctttctattagttaaaaatgcacataatcaaaaaagaaaatcgacttattttagacaaattcattgacaagttctgctttaggtgataaaataaaagtgaaaagtcgaaatttatattgttgggaggtaagaccgatgatttgttttaaggttaagttgcctaacttaataatggagcatttttaccgacgctgccagctttggaggcttagaattaaaattgtttctatttgcgcataagttaggcatgattatttgtctacttatgcgcttttttatttgaattttcagtattagcagaaaggaagtgttatacatagataacatatggcttatccttttgcttctattaagtttttttatgatttttaagccggaacttttatggaaaattgaacacttcttttctgtaaaaggcggtgaacctacagatttatatcttggtttgatgcgggttgctggagtattcttttttattgcatccatcatttgcattattgttttggttttataagagaaggggggcttttaatgaaaaagctaacacgtaagattgttgcacttactctttccttggttatgtgcataagtttttctaacactacttttgcttatgccgacaacgagaatatcagttcttctgctgaagcaagcaaagtgaattggtggaagattggctggattatcctttcagattatgtggaaaagcttatcgatctcgatggacagagtgaaaaggatagtagttgggcctatcttgtttcacctagcatagaatataacacgggtgatatggggcctgaggtttattttcgtccagaagtagataacagcgttggttctatccgtatgcatggacataggattatctttgtcgatatttttacacagattgcactcatcttgtcagatgcctctggtgatacggtaagtcaagcaactactggtacaaatcagtatatgttttatacaaagaaagcaggagacagttctggtacatggaaagcacagtttgtttcaactgagacatacaaatggcagttgtattatgcccattattacaatgccaatgctcgttcaagtgttcctatgacggaagatggattttactttggggataataacagagtttatcaattctctgttgcagaatcttacagacttaattctcttcctccagaggttgttgatatgacacaacttaatgctcaatttattaatcctgctgatggaaaaactgtagattatctcaaagactttaatgctggagatcaagttcatttctctgatataattattgacattagttatgatgcgactgaggatgcgactacattttattttaccgaggatacttatgaggaaaacataggatggaaatttgcaggaaatcttcttgaccaatattccgctggtgatgttctgaatctaacttttgatgtgttgaatgtcggaaactatcagggcattacttttgaaagcctcgactactttgaagcagcttacgcgcataataacggtgccgcttatcccaatattcaagattaccaataatttgattttgacataaggacttatagaagagggcgtgttgcggataattttctgcaacgcgccctttttagtatgctttagcaaaataaagttatcccttttactctggccaaaggaataactttattgcctgatagcattaaaagaaaattgttgtatcacttttgatataaattaaaagtatttagcgtctaaattctaccttgacatttccccaacaaaattgtaaataatcttaacctcctgtgtcctctgaccatcaatcttcttgatttctccaatcagaatccggctaatgagccggttcagcaccgcctcgtccagttcctcgatggcggcatagcgccggatttccttgataaaagtgcggacttcgctttcttgcgcatcggcacgaccttgcatcattgccaggtcatgcaggcgtttctggttggattcctgctcctgttccagcgccgccgtcagcttcacaaaccgctgctcggtcaggatgcctttggccttatcggtgtacaggctcaggaacatcccgtcaatttcctgatttcgggcttccagccgcaggcgttccttttctgtctgggaggcgtccaccagataccggtgctccatccggcggctgagccgctggtagaacgcatcggcatccttcatagcctgcgccgccagttcctgaatgtctttcagcaccagattgtataaatccctggcctcgatcttgtggctggaacagaccttgcagcccatgcggttgtaggtctggcagatatagtacgccttgtcaatcggctcccgcatttcgccggtgaagcggttcttcccggttcggcccactttctcataccgcacctgcatggacttcccgcaggtggcgcagtagaccagaccgtggaacagattataaaaggggcaggaattcccctgaatggtcggcctgcggtcaatgagttcctgcacctgttcccattcctccggcgtcacaatggcctcatggcagccctcgatcacttcccactggtcacggggaataatgtcataggtgttggagcggatgcctttctgatgcgtccgaaagaccaaatgtgcgcccttatagaatggatttctcaggatgtgactgattctggctccgccccagaaataatagttggcgtcaaactccgtgttggctttgacatgggtgattgggattttttcttccatcagacgtttggaaatcctcatgcagcccagcccgtcaagggcatagtcatagattttgcggatgattggcgctgtctcagggtcaatgatgagatgccccttgtcctccgggtcacgcatcaggccgaagggcggcgtccctccgcagaacttcccctgccgggagcgggtggtgatgcctgccagcacctttttagaaatatcccggctgtacatatcgttcaggatattcttaaagggcgtaatgtccatctcctgacgggtcaggctgtccacgccgtccgtgatggcgatatagcgtacattgtgtttggggaaaaagatttcgatatagctgccagcttcaatatagttcctaccaagcctggataggtctttggtgatgacgcagccgatcttccccgcctcaatgtcagcgatcatgcgctggaaggcagggcggttgaaattgcggcccgtatagccgtcatccacataatattcatactggaacattccatgcttttcagcaaagtcccgaagcatgattttctggttgctgatgctcatactctcgttgtcgccgccgtcatccagagagatgcggcagtagagagcggtgattttctcatagacttgttttttcctgctcatagcgttctccttctatgaacagggacacgataccattatagtaccatgtccctgcccctgaatcaaccgtttttacgcagcgttttcggccatttcccgctgttccagccattcctcgaagtgttcgcaggtctggcgctcgatcagctgctcaaaggcttcccgcatggacttctccccggagaactcccgcaccaccacaaaacggactttatttttctgctgtttgcttttttccataggctacctccatagagtagcaggccagacggcagcactggcaacgaagtccggcaacgaacctctgaaaacctgtaaactaccgtctgacctgcaaatcttactttatcaattttcttgaaaaatctcgttgttttcgttgccggagatagagatagatattagaaaataccttatttacaggctttttccgtatccagaccggagaatccccggcaacaaacccggcaaccaagtggcaaccatcccggcaacagaccgctaattttatgcgatccactccttcggcagttccagctggcagcattcttcctcggtcagctccacaaatccatcttcgttgccgggcagttcgttgccggaaacgtcccgttcccagcccctctgcctgccatatccggtgaacatccggggattggagaatggtttccagcccgtcaccaccgtgttcatgatctcgttgatattgtgcagctgccaccgcttcggctcatcgtaggtgtggcccagcgcctccttgaacagctgtttggagcagaccatgctgccggtgtagtgttccagaaagccctgtatctgtccggcctcggtgtcctccggcatgaaatccttctgcacctccaccagctggcgctggatggacttgctgaacttcatagagtagtggccgctgcggtaaatcgtcatggcctccgcccagacctgtaaaagataggctctggaggcgtcctcgtcctccaaaatgtgaacctctgcattctccgggtaaatcatgatcggcaaaaagcgccgatttccggcccggtcaaggggcaggaagtccagtgtgttggacgaaccgccgaacacacactgccgcagccggtctttgggctgggcctcgtagggcgtccggtaggtttccttctggcggctgataaaggagcggatttcttcaatgcttttggcgctgctggtagccagcatctccgacatttcgataatccagtgtccttgcagcttcagatacaccctgtcatcgtccagttttttcaggtcgtcactgaaccactcgtcccggatcgccagcaagcggaagaagctggacttgccagccccctgaccgcccaccagacagagcatttcctcatatttggagccggggcggaatacccgccggatagcccccagcaaaaagtgtttcagcatttcctccacatagtcgctctcgtccgcacctaagaaatgatggagacaggagcggatgcggggcgtcccgtcccagacaaggccgtttagcacgtcctgtatgggatggtagcagttctcattcgccacgatggagagcgccgccgtcatctttttctcactggtcaggccataggtctgctcaaaatagagaagcagatatttcacgtccgtatccgtcagggcactggtattcctgcgccagcctaaatcctgtacaatgtccacccggtcagtcaaaaggttcaggcggatcgccccacgcaggagagggtcatggcagaacaccgtccggcagttgccgatggtgttggcgggctggcccttctcggtgacggacaggctttcccgcacctcatcaacgctccgctccggcgctaaggcttcggctgcgctcatggcggcctgccgggtggctagcggtaaactctgatattcgctgctcaatcttcctcacctcttttccatactcagcgaccacggaagcacgttcctccatgctgccggacaagagaatatccagcagatattccgtgtacggtttcttttgcagggcctccacgaacagcggattccacgcttcatccggcgtctgcggggcgtattccttctcccagcgttccagcagatgcaggtaattgcacagcacccggaaacatttctgctccgcctgccggtaacgcagttcctcgctgatttttcgcttgaccggcctcctgcggggcgggtcatggcctttggcgtcatagtggacagagaaatcctccgccagcttcagcgccgcctccttactgctcagactaaacagacgggcggtaaaatcaatcacatccccatctgcctgacagccaaagcagtggaaccgatggtcaatcttcatactgggatgtttgtcatcatggaagggacagcaggccatgccattcctgccaacctgcaccccgtaatattccgcagcctgccttgtggtgacagactccttcaccgcttcaaatatattcgattttctcacctccaggcagagaaaaaagcacccgtttccgcagaaaatcaggtgcctcataactccatatcgtgtttctttttcggagcaatccgcccctcacgttcccagcgttcccggttatctcggtcagcgttcagcctgcctttcgccagcttctcccggatggattctctggccttctccttaatctgctccttaccggccttcttgacctccggctgcatgagagttttctggatttttgccagggcgttctgcatgacccgtttgattttggtaatcactccatccagacgggcggcagcgtagtcacgctccttcttcggggccttccgctccggcgaaagcacccactttttcgtttcctcgatcagacgaatatcttctttgtgtgtctcctgccggacggtatcggtcaccacctccaccgccttgtcataggccgcatcggaaacatcatctaacagcgtctccacgtcctcgattttgagcgtcagttcttccagcttctgctcctgcgccgcaagctgctccttctgcttcatcaggatataatcctgtttttccagatagtcccgcccgccgtaggacggctcctgatccagatgcagcccatgccgtctggcgatgtcaaacaggatcgtccggcagaccgcatcaaaggtctgcttgcggttgttgttccggcctttgggcttctccgggttggggagagggatgccaagttcttccagcgccttttcctgctgggggcacagttccccatagcggttctcacagtcaaagacgtgccgctcatggatgtggggcgtcccctcgtccagatggagcgcccagtccaggatgtggatatgggaaccgaagcggcgctcaaattcctgataaaactcattgacgatggaaaagagcgtatccggcgagacggattctcccatcgtgccgatctggtagatactttcctccgggcaggtcttgttgtttttcagcaagtcctccacagtgcggttgcgctcggtgtgccgggttttctcattccgggcgttctgagcttccacatagccgccgtaatgctcgtagtaatacatccgctcgatttcctcaaagctgaaatccggctgctccgggttctcccggaactcatgggtggtaaagccccggtagcagtcccagtagacattttgccttgcccgttctgcgtcaatgtgttcgctgttctccacatcgaaccggcggtcattgtggcggggattataggtgccatgcttgccggagcgtccattgtgtcgtgtcagtttcaaacagatttcctccttcctgcgaagatgttctggggccggggaaggggcggcgaagccgcaaatcctgcgaattttgcgtcaggtaatacccaatacaagttgacgcaggcatcaactttccctgggcaaggcgtttcacccttgacccgatggggcggctgccctcaacctgccaaggcacttcgtccttgacccgataatggctgccgcccttaacctgccaatgggcgttgccccttgaccccagcagtgcgctgccgcccctgcaccccgccacaaagggctggccgccctctgtacttccgcaccggcgaagctggcttccaccgcaggaacggtgtttgccagtttcaccggctccgtatccacacatttgcgcccataggcggggagtggatacggaatacgcctgcggggattgccggtcaaaacatcgggtgcagacccgtcatttttcccgtaaacaccccgattttaggcgattttttcttccgttaccaccacctgaaagccatgctcctttgcgtactcccttgcggcggctttccgttcttcgctgtacggaggcaccagccggatcgacagccgggacttgtccagcacataggtcacgctgccctccggcgtgctgcgctccaaccggcacaacagtgggtacttccggctgaaatcagccagcctgcgcttcaagctggcgttgaaggtgtagacgctggcaaggttctccgcctcgttccagttgatgatggtttctttctcatacttagacagcttcttcatacagatcctcctcataatcggtgtaagatttcagcacacgcaggttgcgcttgagacggcggtactcgtccatctccatgcgcagatggtgataaaaatcctcgtaccagctttcgttcatctccgtctccaccttccgggccagccccagcatccggcgtttggcctccgggtcaaccgtcagagccgtcagccatttcagccgtgtcaccgtattgtggtggctgagacagccgtaagcgtagagaatcttcttttctttcatactcagtgtcataatgatttcctccatttctttgctgcggagccatgcgccccgcatgataaacttgtttcctgtccgccggtctgcctgcaagccgctcctgcccggaatttctcccggcgtatcggcctctttggtgtgctcgatttctgtcctggcgtcacttccccggaggccataccccttgcagccggtcattcgattttcaaggttctgtgcctgtctgcaagaaccagtttaccgaaaaaagaggccctttcccgtatatccaaaacgtcggaaaaacgctcgaaatccgcatatttccacgcttatggaatcgtgctataatgggtgtaatcactgaaaaagataacgagagagggggctttggatgtacgcaaagctgacaatcccggagcggctcaaagacctgcgggtggtggacaagcacctgacgctggaacaactggcggagcagaccggcctgtctaaatccgcgctgggaaaatacgaaaccgatgactacaaggacatcagcccgtttgcgattgcaacgctggcggacttttacggcgtgtccaccgactatctgatggggctgacggaaaataaaaatcacccaaacacagaacttcaatctctgcatctgagtgatgatatggtggaacttttgagcagcggcaaaatcaacaaccggcttctctgcgaactggctgcccacccgaatttccggcggctgatgatagatatggaaatctgcatcgaccagatcgccaatatgcgggtggagcagatgaatctggtgttggaggccacccggcagaccgtcatgagcaagtatgcgcccggagaagatgacctctatatgcggacgctggaactggggcaggtgcaggaaagcgatttttacagccacgttatgcacgatgatctggacagcatcgtccgggacatccgggaagcacaccgcaaggacaagaccaccgccgacccgcagcccacgctggatgatgtgaagaaaaaatttgagcaggccataggacagggcagcgatacagaaatgctgatccacgagttctgcgataagttgcagataccctttgagaagatttcctcggaggacttctcggcgttcctgcggatactgagcctgtccaagcagctcaaaagccccaacaatatgagaggaaaggccagccccatcccgcccaaccgcaaggccagacgtaagcggaagtgaaattgagcggcaaaaaagccatccgccggttgattggcaaatggcttttgtgaagctgtattctgttgtggtggttgttcccagtttgggaacagccattattgaagatgctattctttgtctttctgcgacacctgcgcataggcttcctgctggacaagcagccccgccgaaaagccgtatttaaagcggctttcgttttcctcacactgagcgattgccacctgctcccgcagttcttcaaccagtgcatagtcctctttgctcagacgctccgataaggcatccatcagggcggcgctggctttgactgcctgcttgaacctcggtgaatcagcgaccaccgtttcacatggataaaatctgccgttatacatttcttccagaatcatgcgtccacctccctcagacaaaaatcatctcagacaggatgatttcctctgcccggctgcgaatgctgttcatggttccgacccacgcaagctggtcacgggctttcagttcctcggtgacactctctgcctcctgcatctgcgagacgatacacgccagtcggtcagcggcctgttcgttcaggtcagcaagatatgtccagagttttcccaacagaagcagtgcattgtactggccgggccggtgttcttgcagaaacgtcttgtgcatccggccccaccgtccaatggggcggctttcctccggcagcttcaaatcgggaatgtagtagtctcccaccagcgtgtagctgatgccgttttgatggattttctttggtaaatgctccatgttcgacctcctgtattcagttttttcagaatccagttgatcgtgtccctgttcatgataaattcaaggcaactgaactcttcacgaacaagtatggcatatcctttcctaatttctgataactgaggccgtgggaaacctggctgccccggttttcggactggttatagagatcaatggtctctttccccagcagctccgaaatctccttgagcgtagacttctccttgcctcccaaaaacaaggtgctgtcacagttaccgacgatggtatctgccgcgtccttgtagatggtctttagctgactctgcgactgcaaaataatagaagccgatatttcacggcttcggatggtggcaatcagcttatcgaagttcggtatctggccgatgttggcaaactcgtccaggatcagacggacatggacgggcagccgcccaccgtagaagtcatccgccttgtcgcagagcagattgaaaagctgactatacatgagggcggccacgaaattgaaagtgctgtccgtatctgacaggatcacaaacagcgccgtcttttggtcgcccagggtatccagttccagttcgtcatattccatcaggtcccgcagctccttgatatcgaagggagcaagccgggcaccgcaggaaatgaggatggattttaaggtcttgccagagacgaaaagtcaaggactttttcatcaaattcaaaaagaagtcacattttgcggacttcctcacggagcagacgcttgattttgtcctccatcgtctcttttgcggtctcgctgaaatggacacggacgatataggttgtcttgccgatctgctttctgacagtcgggcaagtggcggtgttggttgcggtattgttcattcaaaatcctcctgtaaatgaaaaatgcccggtgactgttcatcatcgggcggtgtcggtatgagggaacaaggcaaggcggcaacattaaggtatctataaaaaccttgccgtctttgccatgcttgccgtgttcctgttgtcagtctcggagatagcagacccatgctgtgccgtctttctcggtcacaagcctgtctccgatacggctttttgccgttctcatggtgcgtgaggaaatcccacgctcattgactgccttttccagctctgcgctcggcatacgctttccgtctgccagcagttccagtatcagtgcttctgcctgtgcggtcttgctttcggtcttggcggtgtctgtcccggcaagaagctcgtcagcggtaatgtcataagctcctatccattcaaagcctttctcgtctcccagagaaaaggcaagggactgtccgggcggcgcaagggagcttttctcatggataagcaccctcgttgtggggctgtccttcagcttgccgataaaaagcagactgcggactgccgccgtaatgtcgatagaccctaatccccgataggtgctttgcgttcctgcggctttgttcaggtgtccaatcagcacgatagcgcacccggtagcctgtgcaatgtctcccagactgcggaatatcgggcgcacctcgtttgccctgttcatgtccacatctgcgcccagaaacgcctgtaccgggtcaatgataaccagccttgcgttgttttcccggattgcccttgctatgcgttcatcggcaagggtcagcggcgtatccctgtcatcaatgacaagcactttttcgaggtctgcgtctgcttccatcaatcggggcttaacagtatcgcccagaccgtcctcggcggtctgatagatgatattgaaaggctcaagggtctccataccgggtaaaggctttcggttggtgcaagccgccgcaagacgcatggcaaagtaggtcttgccctcgccggggttgccctgtataatcgtcagctttccaaaggggatatacggaaaccatagccaatccacgctcgtcagctccacatctaccatacggagcatggggacaggctgggcggtgggcagctctcgcagcgtgattgtttccgctataaatttgcggctcggaatgtccccttgctgacggagaacatcgttccagtctttccttgccgggacaaggcgaatgacggcgatctcgctgggaatggactgtgccagtcgggtacaggcttcgcttcctgcggtgtcgctgtcaaggcagaggaacactttttgggtgtccttgcgttcagaaagaaaacggtcaagggcttttcccgaaacgccgcccagggcaagatagctccttgtctgccagtcctgcggataaaggcagatgaacgataacaggtcaatcggtgcttcaaagacaaagagctgattgccgtttccctcatagcggaacggataggacttgtcagccccggcaatgtcctgtctgaatgggtctgccgttcctcgcacatgggcgtatctcggcgtaccgcttcggtctctgccgacaaacacaacattgtgccgctttgcgtcctcgtaaatatccccggaaagaagaaaagcctcaacaagcgttttgttgagacctcggctttctgtgagatattggattgctctgtcggctgtcctgttgtgcaagggcaagtgaaacgctgtgtgcggtgctgtgctggcttcgctctgtccctcaccgctttcgccggttaagagctggacagcttcgggaaaggacttgccgtaaaactccatgacaaaatcaatgggatagccgcccttgctctggctgtggcgaaaccacttgtttccccggacggtcaggctgtcatgttctttccagcggtattcccgtccgcttttgacaagtgtctctccctgtgtacggagaaaatcttccagactgacggcgtttgcccggtcaatctgtgcttgggtataattcatcgggatagttcctcctttttgtgtcgtgtttggggtcgattttggagcttttgttcctctgtgtgctcgttaaatcgggcggcagtatctacacatgacttgaccttccaaaggcggtgtaaatcgtctctgacagccttaaactcgccataggtggtttcgtgcgcctgttccagctcgtcatactcttcagtcagctttttcatatccaccttgccgtccgggaactccccggtcagctttcgtctggcggcgtagaactgtatcagttccgcttcatgctctgccttgtacttggctctgggcttctcaaacttgattttctgcaagccgtcatagacaggcttcaagctctggaaagcagcagagctgtcatagagctgcttaattgctttcattcgggcggtctgttcgtccagcgttttcttcaagctctctgtggcagcactgtgttcgttgacatggctttccaaatcttcaagggtgtaaatgccattcttccgaagataattgaaagtctcgttcatctcctttagattgctgaccttgcctttctgggaatacgccccggcgttgcggctggtgtaataggcgttcagcagagaaacaaggtcgggtgcctgtggcttggcaagctctgcttttgcttcggcaatccaatcaaacagaagagtgattttcttcttgatgtcacggataacggcattggtggctttgatccagcggttgaactctcccttttcggtgcggatacctttcttctccattgcccggacggttgcgccctcgtggacggtgggaagaagctccacgccctgacgctcatagctccggtggtctatacgaacatcaatacatttttccgcaaacttggcattgcatagctccgcccatgcttcacgccaatgttccagcgtttcgggactaccccagtcggtagtgggaacggcgttgaacacaaactttccgtctgcgtctcggatacggttgctgtcctcgtccagctcatacacccggcgttgctttagtccccatttgccgttctgctcgatggggcggatggggcaaagcacatgaaaatgtgggtttggtatgccgccgtcctcccggtctggctggtgtacggcgaagtcaaccaccatgccacggctcacaaagttctccaacaaaaattgccttgcaagagcgatgttttcctcaagggaaaattcattctgcaaggcaatgtcaaaactgtatgcaagctgggcgttctttccacgctcggctttttccacagcgttccatagggtctggcggtctgcgtattctggcggtgcatgggacggcaggagaatatcggagcagatcacgccgcccttgcgggtgtagtcgctgtattcgccgtaatactcgctatacaatcgttcccctgcacggtaggcggcagaagcaatagcggactgtcctgcgcttcgcttagtctgcgtgacgctcagatgaaatagtgccatcggctttcaactccttttctctgtttgcttggctgatgtgggtaatcgtcatgtgacggacggctcgctggacttcggacagagaaaagatgtgttccatcagctctgtcatttcggtgcgtgtgagatctttgacctccggggcaaggctctcaaccgtgccgcccagattgcaaagacgatgggtgcgcttggtgcgttcgcctttctccagatatttctttctgttctccaaacgctccagcttgtgctgttcctgtaaaagctgcgtctcggctcgctccttttcggctcgaagctgttcaagggttttcggttttgccattgtgcttgacctccttttttgattttggggataaaaaaagaccgccgacttttcgcatagtgcgaccagtcaacggtctgattttcggtattcggtttttgtgttcagttagacaaattggaatttattttggcaaatcatcttccgctttaaaattcacattactgccatcgatcgagattgtgatcgtgtagttatagattataccatcttctgtttccagcttaaatgttaccgcaccacctccgagatactgaaaatcaggttcgtcagacatttttgcatatgtgccatactgttgaaagtatccgtctgcatcaaagaacgcaacattgcttgattgctccttatcgttccggaagagtactgcaccaacacggtcactggcatgatctggaattaaaacacagtctatgtattcccaatctgtttcttgcacaagagagaacatagacacaatatcttgttcagaccagatttttcctccattcagattactgatatctgtattctgaaccggattgctggcagaatctgatgtttctggcatggcgtctttgctgctacaggcggacattcctaatacacaaaccgtcatgaaaataaaaagcaatgctctcttcatatgaatacctcctcaaattccgatttgcttgttccataaaattcattttattcgccttcaaacttgctggcggcgaacagcattttatgctgtttgcggacggcaagtccacaagggatagccgctttagcggcgcaagggggtgtagccaccttgacggaacgaagtgacgcaacattctcggtcaagcagttttcttctgctgacggagaatgaagctccgcaggacgcacgatactcccgataggagagtatagaagtgcgccctttagttcctaaagggattttatcagttcgacaaattggagttggttagtctttcttgctatcatcaacaatggcaagaaccaatccgacagcacccactgccaatgtaagcaactccattcccgaactacacatttgcagtaaaatagcaaacaacaaaatagcaatacctttattcttcttcatgcaatcacactcctttgtcaaattccaatttgttgctcaattttcatattcaaattataccataaaacttgtgaacaattctaccgcaactttggactatatgagaaaagtccgaacagttttctgcccggacttcctcgctcaatcataaatcaattccgctttcacaacttcctctgcctgtgccttgcaagcgttcatctgccgcacccattccatttggttttcggctttcagttgctcggtcacgccgttttgctctaccagtgactgcacgatcagctccatgcggtttcgtgccgcttcgtcaatctcggcgcaatgctcaaagagtttatcggatagtaccagctcattgaacagtatcgggcggtgcatttccagatacgctttgcgaagtctgccgtagtgtccgaggggcttggtcttgcggataatgatgttcgggataagataatcgccgttctgtgtgtaggtgatattcatgctgtttgtactcctttcatcggctctctctgcggtaaactgctgacaggaacgaacacgccctttgcaatgtcctctgcacgaatggcggctttcttggcttcgatttctgcctttttccgcttcttgattttgtcctcgtatcgcttctgcgctccgctggctttccgcttcaagtagttctgatgaagcctgtccttgcgttcctcacgtttgcggatttcctctaattcctccggggtaagctccacttctccaaacgccgggggaacgaaacgcccgacaaaattgaagtaaatctcgacctcctgtgtggtctgtatactgcctttgcggtcacgctcatgcacaaggattttctcgataaactcgttgagcatggcaatggtcagcttgtcgaagttctcatatttgtcgatcagagcaataaaacggtcagcgtccttttcatgcttctcatagctcttgacagccttttccagaacagagatttcagcggtaagctcggcctgttccttttcgtattgagcgtccagagtggcgtatctgctgtcggacagctttcctaaaatgttgtcctcatagattttacagagcagtacttccagctcggaaactctctgctttgcggcggcaaggcgtgtccgctgtttcctgacctctgtggtctgctggctggactgcgcttcctgcaccacacggacaaactcggctctgtcatgcttggcatattctgcaatggctttcagcatttcagagacaagggacagtaccacatcttcattgatacggtgctgggtcttgcagagcgttccgcaaggaactttggtgtactgtgagcaggtgtattgagaaatgcgcttgccgttgttggtgcggtggacatacatcttgccgccgcaatcggcacaatagagcaagcccgtgaggggagctgcttcgccccagccgtccgggtagcgtctgacattcccacggattttctgcacaaggtcaaaggtctgctggtcaatgataggatcatgggtattctcgaaaattgtccattcgtcctccggaacataatggcttttcttgtccttgaagtgctttcgggtcttgaagttgatggtgtgtcccagatactcacgcttttcaagaatgttgcagatggtggaagaaccccagccgtacacatctttgaaagtcttgtttttattcacaccctcgccgtgccgggcaaggtaagcggacggaatgaggactttttcttctttcagcttgctggcgatctgatacggaccgtagccctcaatcgtcatggcaaagatacgcttgaccacctcggcggcttcggggtcaaccagccattggtctctggcttcgttccagagatagccgtaaatgaccgtgcctgtgaggtgcttgccggacttgcctttggactggaaagtggaacggattttacggctggtgtctctggcgtaatactcgttcatgatgttgcggaaaggggtaaaatcatcgtcccctctggcgctgtctacgccgtcattgatggcgataaggcgaacgccacgctgacgcaggatttccataatctgaccgactttcagatagtcacgacccatgcggctcatgtccttgatacacaggtactccacattcccggcttccacttctttcatcattgccaaaaatccgggacggtcaaagcaagtaccactaatgccatcgtccgtgaaatggacaatgtttgtaaagccctgccgtgcggcgaactcctccaacatagccttttgattggaaatggaattgctctcacgctgttggtcatcatctttgccaaagtcatcacggctcagtcgttcgtacagagctgtgattttctcgttttttctcataacttgcgctcctttcttcgattttaggttgtgtgttctaagagacttcccaaccgcttgattaagaagtcttttagagcatacaacacccgccgccatcttgaatttgcggtactgcttgacagcaaagtggtccggctcccgttcctccaactgagaaaaaagcaggtccaccgggctttgataagtctcgtcgtcctctctggcctcactggcattgataaggtccagaagtgtgatgaagttcttttcttcctccgtggcctcataccagatgtagccgatcagtgcggaataatagaggcgttccgctttgacccagaaatcttccgaagatttttcgccttcgcccttcgtgttcataatcagggcgttcaccagttttaagatatccttctctgaccgaatgtaagccagtggattgtatttcatggattttcggaagtttatcaggttgaggcatttgatacggtatttcttccgttccaggaaagtgccgatctccggcagcaaggttcctttcggatcggtgcagacataggacgaatgggcttgcagcagcgacggcttacagaagaaccgcgtcttgccgctgccagaaccgccgatcaccagaatgtttttgtttctggcatacttcggctgctttggacggctcgccattgtgatccgctccgtctgcgtcatagggatgttctggaaaaagttcttgtccatgtagggagcgatatctgccgccgtaccccagcgggcagaaccatactcgattccgtggcggtatttcttggcgtttttgcctttcaggtagaccgccatgcgaaggaccaccgcaccggctatgccgatcagaaggtccgttggctggaaactgagccacggggaggaaaacgctgccgtgaagccgtctccgatggagagcagcttgccggagaggtcagcaccgggcgcaagccggaaagcctgtgccagcttatcgaaaggatacataaacagaagatacggaaggttcagcaaaaacagttttttcatgttcatctctgcacgctccgatctttgacctttactttctcccggtcaatggtgcggtgttccgttttctccgccgcttgttccttcgcctgggttagccgctcccggatggagggcttttcctcacggcttattttccggctggcaaactcctgaaacgccgctgtgatggcgtctgcgtcccggcttttgaaaaagaccaggtaacggggctgctctgcggaggtgtctttcttcaaggcaaaatccacatggtatttcttcgccacacgggagaaagccttgatattcttggcactgatctcgatattggcaagcccggcgttctggctggcaagctgtttaagactctgcctgccgcggtagattttgggcttctggcttttctggatttcctccaggaactttttgacggccttttcaaagacctgctcacttagcttggctccgtcaacaatgagcgtcacggcgccccgcgttacttcctcctgcatttagcctcgccccctttgcccgtccccgtacatatcatgctgcaccagggaagaatagtagctgttgatggtggtcggggcgttatacagcgccgccagaagatatttcttgatattgcggacataggtggtgttgtccttcatgcagtccataacatactgaacatgggagctgtccagcttcataaaccgggactttaccacctccgctggataatcgtctccggcaatgcggatgactttgcgggcagaacacacggtatccacgatcaggtcaacgatctcgtcaagctgctcacggtcgatatggctgtcctgcaccagatagctgtactcgatgttatccaaaatcacttcacgataacattctctggctcccatcccatccgttcccatccttgcccctacgggggtagggggatttgattggataggatttgatagttctgtacttgataaatcagtctttgacgtttctttacttgatttcttagtatttaattgtgcggggttttccgtacacggtttcgccgtatccgggatacccatatccgggttttccgtatatggctttgccgtacccggtaaaggcgtatctgggcttgacggcggctcgcactgaggcatttcgtaaatgacatactcggtatccgtgatcttgcctttttcatcccgaagctgtgtgcgccggatatacccgtgggtttccaactccttcaacgctgcaccgatgctgtccacaccttcccggcagatcgccgcaagacctctggtggtgtaattccactcgtcagggagcgacaacatcatggacagcagccctttggatttcagggtcagcgtccgatctttcaagtgatggttcgacatgaccgtataatcacgggtcttttcaatacgaaaaacagccatcttcgcacctccttcctgtgaaaataaaaagtgttgattttgagcggtttatctgtctgtacgccttcatagcctcccgcatgggaaaacatccacgccctgttcagaacgcaagccacggaggaagaaacagaagattttccgctgattttgatacagtttgtggcggctacctctcacggtctttatggtcatagtggagatcgccggaaagcaccttcgcatggttacggattttgatatgtcccttttcctgattttccaaagccttgctgtatccggtgtcggtcaggaacaggcgcattttctcacccttccagccaacaggcgagtcatgggtaagaacatcaaagacgatcatgtgtctggttgccgggtcgaaacgctccaaagccataatgtcatggccggataacttctgcgccccggatttctgtctggcctctgccagcatttccccgatggtgtgggctttctccggcagacggtattcggcctgcaccttgcggatcaaatccatgcactcctgatccgacaggggacggagcttgtccagaaggctttctgccgtttcttttactgcctggttcggcgcatagcgccatgtcatgtaaatctcattcagggcagcgttctgattggtactttcaatctgaaacaccatcctcatttctgcttctgtcaatttcattgccagcctccttcaaaataggtataaaaaaacgccataggttttttgagcctacggcgtttcttgcgatattcacaattccaaactctccagccactcgtcaaaagatttcttggagacgcgaatcgcattgcctatgcggatgatcctgaactcctcctgcttgacgagctgatatgcggttgtgcggccaatgtttagcatggctgcaatttgttccacggtgtatgtgcgcggttccggcagtgactttttctctttcttgtccatagtaacctccatgtatttgccttgtcattttgactaagggagtggagaatggcagtagcaatcagttttggctgggtgtcctcttgctaagaatttgctaataggaccacccaacggacacataaaactgcgtcagaataggcgttttgcaccataaagttcgtttactacaagtcattctgcgtaagggatgatattggaagttacatccgaaccgtgtatcacatggtaagccatactcctaagcggaaggtcggggattcgaattccttctggcgcgccataaataacgctgaaagcctttattttcaaaggttttcggcttttttattttttgctgtggttgacggtttgccggcaagcaggctcgcaagtgcttttgcgtcaagcgcgggtgcggtgccgaaagccctttgcgtgcgccgtttcgcgctctaccgtttcgcctgtgggaatcccgttctcatctacaatatctaaatattccgccatactatgcctccggtttttccgctttgatttgtctttattttcagcatagcacgctgcatggcttttttcactcgtgtacaaaagaaactgcaagacaaattcggttccgtatgctataataagacacacaaaaaattctcaaaggaggaagcacggctgcgcatttttttcgtcggcagccgtgcagaaaaggcatgaacaatatcgaatggtttcgcgaagcgaaatacggcatgatggtccacttcggactctattccatgctcgccggtgagtacagagggcgccgtacgccctacgactacggtgaatggatccagtccgcctttgccatcccgaaccgcgaaatggaacagcttgcgggtgcgttcaaccctgtttattttaatgcggaggagtgggtaaagcttgcaaaagaatgcggcatgacctactttgtggttacctctaagcaccacgagggctttgcgctgtttgattccgactgtgatgcatacaacatcaaaaaagcaacgccatttggcagagacctcatcgcagagctggcggaagcctgctacaagcacggtttaaagctggggctttactattcgcaggagcttgactggcaccacccgcacggcggcggctacgacaaaaccaccggctgcgccggcacggcgtggtataacaactgggatttccccggtgcagacaacaaagactactccatctgctttaacgagaagatcaagccgcaggtgaaggagatcatgacaaaatacggcgacatctgcctgatctggttcgataccccgggtgtgatgacaaaggcgcagagtcaggagctttacgaccttgtgaagcagtatcagccggactgccttgtgaactctcgcctcggcaacggcgtgtatgattacgtttctctcggcgataacgagattccggcagagcgtccggcagagatatcgaaagaacgcgcaggggacatgcagtccatgaacgatctgttcggcttcaagtattcgccgtataacctctatgagaccgcagccacgctgaatgacacatggggcttcaaatactacgaccacaactggaaaacacccgagcagatccttgcaaacaagcagaagctcaacggcatgggtgtaaactaccttttgaacgtcggtcccgatgcgctcggccgtattccgtcctattccgtcgatattcttcgccgcgttcgcgagctggaaacccaattgttacggtgagtatctgacgtataagccttctgcgaaaacggcacggagctgctggtcggtgcaggtgagagcggcgtttgcctgccgttcatgtcgcagagcacaacggcatgtgtgctgacacaggccgcaggatagaaatcgtgcaggaagcaaactgctttgaggtttacattcacaaattctgtttggtagccatctggcaaaagtgcaacaatttatcccttgcaaattcaaatgcaagagatttgcgttgcactttttctctacctgctgcctacaaattattcttcgctcaagtccgctttggggtttggctttttatttgcagccttatgaaaccgtgtgagcaacagaacgccgattaaaataaatgccggaaaaaccgcggaaaacagcatgccgctctttaaaccgagttggtccgcagtgagattcgggaaagatgcggcgatgtttgcattgccggaaaccgcgccgctcactgcgcccatcaatgccgggcccacagagcagcccacgtcgcccaacaccgccaaaatgccgaacatcgccgtaccgcccttcgggtacgcggcagaggtcagcgagaacgtgcccggccacatgaggcttacggaaaagccgcacagcgcgcacgaaagcagagaaagccacgggttttcaaataaagccgtaccaagatagcacaaaatacacagtgcggcgcagaataccatcgcgcccgttaaatgaattttctcgccccacacgccgtagattgttctgccgatgcccataaacaccgcaaacaggcacggccctaaaaggtcgccgatgactttcgtcacgccgagcgcacgctccgcaaacagcgagctccactggctcatggcaagctcgctcgcgcccgcgcaaagcatcaaaagcagtgccacgaggaaaattttcgaggtaaacagcgttttgagcggtgttttctcttcctccggcacggtgggcatcagcggcaccttgaggaaacggaataaattataaagcggcagcaaagaccacaaaatcgggatgataaaccacagatcctcgccgatcaagcgcagtaaaagcgtcgtgatgagcaccacgcccacctgtccccagcagtaaaacgaatgtaaaaggctcatcgcggaggccttcgcgtctcccgggcaggaatcgacaatcgggctgatgataacttcaatcaggccgccgcccacgccgttcacaatcgtcgcaaggacaagacccacatacggcgcaggcagcacgttcggcagcgtgccctgcatcacaaggcctaaaaacgccagcgcgtgtgcgataaccgctgattttcggtagccgatgcggtctacgtatttaacggaaagcatatccgtgatgacctgcgtcacaaagttgcacaggatgagcgccgaaatcagcgaatacgaaatgccgaatttgttttggaacagcacgaaaaacaggggagagagattgtttacaatgccctgcgtgatatacccgcggtagcaggcaaacacggtgcttttaaagttttgggtcttctccatttaactataccgcctttaataaaatgctaactttcattatagaggaaggcccggcgaaattctaccgtgaatttgacggaaaaccacaaaaattcaatacatctaccgaaaggcattccaaaaaaatgcggcgtaaaagccaaatccatgttgattttaccaaggaaatatagtacaataaaaccaaacagggttttctctttcagaaaaagccccaattcaatctgttattcttttgatttattcaattagaaggagtgttttaacatgaagttaggcgtacttaccaatgttgtaggcaacatgcctcttgaggacgcactgaagtatttcaagtccatgggcatccagatggtcgaaatcggctgcggcggctatccgggcaaagatcactgcgatccggaagttctgctccacgatgaagtaaagtatcaggagttctgcgataccatcaagaagtatgatatggaagtcagcgcattctcctgccacggcaacccgatccacccgaataaggagctggctgcggcttatgataaggacatgcgcaacgcagttctgatggctgaaaaatacggcttgcatcagatcaactgcttctccggctgcccgggcgattgcgagacctctcagtatccgaactgggttgtatgcgcatggccggacgatttcggtaagatcctcgagtatcagtggaagatccttgtcgattactggaagaattttgtagcattcgcaaaagagcacggcgtcaacaagatcgctcttgaaatgcaccagggcttctgtgtttacaacacggagacgctcctcaagctccgtgaggctgtgggcccggagatcggcgcaaactttgacccgtcccacctcatttggcagggcatggatccggttgctgttatccgtgagctcggcggcgacgcaatcttccacgtacacgcaaaggatacccgtctcgataagtacaacatggcaaagaacggcgcgctcgacacgaagagctatgcagacgaagcacatcgctcctggatcttccgcagcgtcggctacggcaacgatctgctctattggaaggacatcatcagcgctctgcgccttgtcggctatgactatgccatcagcattgagcatgaggatagcctcatgagccagaacgagggccttatgaaggctgttgagaccctgaagtccgctatcatcttcgagccgaagatgaccgagacccgttggatctgagttctttctgacaacacgtaaataaaaccacggcgcttcggcagggcaacctgtcggagcgccgcttttatgttttaacggtttgctttttgtccgtatgatacgtgcacagctttaaaaacggaaacagcaaagcggcataaaaccctgcacaaaccgccgtttgcagcaaaacaaggggaatacccgaaagcgaaatgcttttcaataaaaactgtgttgcattcgcggcaagcagtgcgaaaaacgccggcatcactgcacttttcaatagcccgatatgtacatcggcgacttttaataatcttcgtacactcagcatcgcgttgaagatggacgagaaaaacaaaattgcaatgtacgcccgcataccggcaaaccgcatgaaaagcaaaatcaaaagcacacgcaaaaacgaatccgaaaagttgtatttcatggagttcagctgctcgtcaagcccctttaaaagactgtccaccacgacatccagatacaaaagcggtacgagcggcgccaaaattttgaggtatgccccggcttcccggctcttataaaacgcctcgccccagtcactgccgaaaacgaagaagatccccgagcagaaaatgccgaactgcagggccgcgtgcaccgcgcgctgtgtgatatgccgcacggccctgcggtgcgaaagctcaaattcccgcgccgttttcgggatgagcaaagacgcgaacgacgtcaaaaacgaagacggaaagtacagcatcggcattgccatgccctgtaataaaccgtaggcggacatggaagccgcacgactgagcccgtaccgcccgagctcgcgcgggatgagcagattttccgccgttgaaagtaagctgcgcgccgcgctcgaaagcgtgcacggcaccgcaatgtggaacatcccgtgcagaacgcccgtcgcctgctctttttctttcggcgtgttgcgctttaagctgcggcggtaaatgaggaaccccgccaaaaacgaaacggcttctccgaatgttgaagcaatcatcgccgcaaagcacgcggcttctatgctctgcggcgcaaaataccagaacagcacaacggcggagaaaatcgtcagcacctgttccaccgcgtcactccatgaggtggaaagcgattcgtccactgctaaaaaatatcccttcatgcacgtgcactgcgacataaacggcagaccaagcgccaaaatgcgcagagacggcgccgcgccggcgttgcccaaaatatgcgcggcggcaaaatccgaaaagcacagcagcaaaaccgcaatggtacagctcaccgtcaggcaaaacaaaaagcactgcgtcaccacgctgcgcaccgtgcagcggcggttcgccgcaatggctgccgttaccatgcgcgtcacggccaagctgatgccggaagtggaaagcgtgatggcgagcaggaacacggagaagatgagctggtaaagccccatgccctccgcaccgatcttgcccgataaatatgcacggtagccgatgttcgtaatgcggaaaaacagtgaaaatgccgttaaagcgatgccttgcagcagaaatttgcgttttgtcatgattgtcgcagggcctcctattgcaagttttccgggcgcgttgtataatcagcttatatgagaaatgtatagataattttctgcattttataaaaagagaacaggagttaaaaaatatgacagatcaggtaaacgcagactggaccgaattacaggtcaccattcccgcggcggatacggaccgcgcgggcgacattgcgcagatggtcgtgccctacggcatttatattgaagactattcgcatttagaagaggaagcgatggagatcgcgcatatcgacctcattgacgaagaccttctcaaaaaagaccgcaccaaaagcatcatccatgtgtatatcagcccggaggaaaacccggcggaagccatttctttcctcaaagagcgttttgaagccgtcggcattgagaacaccatcaccgccgccaactgcgcggaggaggattggatcaacaactggaaaaagtattttaagcccatccccgtcggcaaccgcttgcttgtgcgtcccatgtgggaggacgagtacgaagcaggtgaccgcgtcgtgctgcatctggagccgggcctcgcgtttggtaccggcacgcatgaaacgacccgcctttgcatggagctgctcgaaaagtatgtaaagccgggcgataccatgcttgatatgggctgcggcagcggtattttgtccgtcgccggtctgctgctcggcgcaggcagcgctgttggcgtcgatattgatgctctcgccgtcaaaaccgccgttgcaaacgcagagatcaaccacgtcggcgataagttcaccggcatctgcggcaatctggcggataaggttaccggcacattcgatgttgttgtcgcgaatatcgtcgcggacgtcgtgattttgctcacaaaagatgccccgcgcttcatgaaacccgctaccgtctatatcatgagcggcatcatcgatacaagggaagacgatgttttggcgtgtctcgcggataaattcgagatcatcgaccgcaaagaggaaaaaggctgggttgcacttgcagcaaagctgaagtaaacatagcgaagcgacaaacaaagtctttggtcaagttttcttcagaaaacttgcgggttatcagggcagagccctgattcgtcgtccgcagacgacgaaattcttttgcctacattaggactaggaaggtaggctaaacagtccggtggactgtttagccgcaggaaacccagtcaatggggttcctgaacgactcgtagaaacgagtcgttagaaaatataaataagcactaaaaagattcggagggattatcatgacagcagaattccacaaggcaaaccgtcagcgcctgtacgccgaaatgaaagacggcagcgcagccgtgttcttttccggcggcgcaccgcgtcagagcgccgatgcgtactatacattcttcacaaaccgcaatttcctgtatttaacgggcatcaaattcgcggggctcgtgttggtcgccacaaaaatcggcggcaatgtgcaggaatccatctatatcctcccgccggatctcatgaaagagcgttggacgggccgcagaccgaaagccgatgaagttatggtgcagtccggaatcacggatatccgcttcgttgagaactttgaaaacgatatccaccgtgttttgaacagcggcaacgtgcagcgcgtctacctcgacctctaccgccatacgccggacgagggcttagatgaagcccaccgcttcgcgcagaccattaagaccggctacccgttcctcacggttgaaaatatcctgcccatcttaaagcgcctgcgtaccctgaaggctccgtgcgagattgacgccatgcgtcgtgccatgaccgttacgcgcgaaggcattctgcgcatgatgcgcgcttcgcaccccggcatgtatgagtacgagtataaagccgagtttgactacgccctcaccagcgccggcgtgcttgagcccgcgttccactccatcatttccgccggcgaaaacaacttctgcatccattacgacagctacatgggacaagccaaagacggcgatatgatcttgaatgacgttggcgcgcagtgggacggcgagtgcaacgatgtctcccgtggctggccgtgcaacggcaaatactcgaaagagcagcgcgtgctgtatgagtgtgctctcaatacgtcgaactatatgttctccatcatcaagcccggtatgctcatggacgatgtggataagaccgcccgccgctattgctgtgagcagctgaaaaagatcggtctgctgtcctcttacgatgagatcggcaaatacatgtggcacggcggtgcgcaccacgtcggctacgacgtgcacgatgttgtcgatgcactcggcaagcctatcgcgccgaacatggtcttctgcgttgatatcggcatttacgccgaagagctcggcatcggcttccgcgtggaggataactgccttgtcacgccgaccggcgcagagaatctctccgcgtccgtgccgcgcaccatcgaagacatcgagaccgtcatggcaaaataacgggagaaattttaatgaagctcattttacccgagcagattacggaagcgcagtataaagcgtatcttgcggattggggtgcagagcgcatcgtgcccattgcgtccgcgaacgccgcaggggctacgccaaaatgcagcttgcgctcgcgttgcctatcgcacacaccataggtttgcagaaggcgctcatcacctgcgcagacgattttgaaagaaagaagtgaaaaacatgacaaattttagcaagctcgttttgaaaatgacggagtacgagggcggctgtgtcgagcgcgtcaaccactttttgaaggtgttcgcgttcgcaaagaccatcgcggagggcgaagacgtggacgatgcgacaaaagaaattttggaagccgccgctattacgcacgacatcggcatccgagtgtgctttgaaaaatacggtaactgcaacggccctcaccaggaggtggaaggcccgcccatcgcactcgaaatgctgcccgcgtgcggttatactcatgggcagacggagcgtatctgctatctcatcggccaccaccacacgtacacgaacatcaacggcatcgattatcagattttggttgaagccgatttcctcgtaaacattttcgagagcggcatgacccatgaagccgccgaaaaggtgtacgagaacatcttccgcacaaagaccggcaagcagcttttaaaagacctgttcttgtaaattgcacataaaatcaaaaattagaatattgacatttatgagaaataaccttacaattaacattgcaaggttattttttacttgtcaaatttttaaggagttgtgatatatggcaagaaatttcatgtgcaccaaaacagacccggtcgtcgagaccaaagccggtaagctgcgcggttttcagcttgacggcacatatgtgttccacggcgtaaaatacgccgatgcaaagcgtttccaccagccgaccccggtagagccgtgggagggcattaaaaacgcgctggcttacggctacgtgtgccccatgctgcagcaggatcagcccagcaacgagctgatggtgccgcaccgctattggccgctcgatgagaactgtcagtacctcaatatctggacgcagcatcttgacccgaacgccaaaaagcccgtgctcgtttggctgcacggcggcggattcgcggcaggctcctccattgagcacatcgcctacgagggcgaaaacatgagcaaatacggcgatgtcgtcgtcatttcactcaaccaccgtctcaatatcctcggctatctcgacctttccccgttcggcgaggagtataagaattccggtaacgccggcaacgccgatatggtcgcagctttgcagtggattcacgaaaatatcgcaaacttcggcggcgacccggaaaacgtcacgctgttcggccagtccggcggcggtatgaaggtctggacgctgatgcagacccctgcggcggacggcctgttccataagggcgtcgtgcagagcggctgcatcgatcacttcgtctccggcaattccacggagcagaacggcaaagccatcgtcacggcgcttctggcagaattgaagctcgatgatgtcaaagcactggagaccatcccgtatgcacagctcgcggcggcgtacaacaaggtcgcgccggaggtcgcaaagacgggcgcatacgtcggcggcaacccgctcgcaaacgattggtacctcggcgatcctctcgaggtcggtttcacggagcacgcaaagaccattccggttatggttggcaccgtgctcggcgagttctcgttcatgccggcattaagcgaagaggaaaaggccgatgctgcactcatcgattctatgatcgaaaaacgctatggcgcagagggcaaaaagctcaaggagatgttcgccaaggtttacccggataaggacgtcagcgacgtgctgttcatggattccatcttccgcgcgccgtctaccgatttcatcttgaaaaaagcacagcacccggaaagcggcacgtattcgtatatgatgacctacaccttcccgtatgacggtgggcatatcgcatggcattgcagcgagatcccgtttgtgttccataacacgagcctcgtcgccgcgtataacgagcccggcgtgaccgacttgctcgaaaagcagatgtgcgacgcgtggctcaacttcgcgcgtgacggcaaaccgtccagcgaagatttgccggagtggccggcttgcaccgcagacgacgaagcgaccatgattttcgacaaaaagtgtgaagtcagacataactacgaccacgagcttgttgcgctgcataaaaaattggccccctcgccgtggagccataacgatgacgaggaagagcagcagatccagcactaagcgcttcgcatttgcctgtgaaagcgaacgaataaaggctttgatttaaactttcttcgagaaaacttgaggggacttggagcactgctccaagtcccctctgcctttgaaaaggcgggcgaaatttttagtgtcgctgcgctatgttccccgcaagcttctttttttgcgcagcaaaaaagccgaacacaacttctgtgctcggctcattttgcattaaattaaattacaggttagccttcagccatgcaatgtcttcagcaaggcaagctacgcgatcctgcgggtcgttgtagctggcttcacgctcaacaacgtaaatgacgttgtcgcactgtgcgtcggcagctgccttaacagccttccagtccacaatgccctggccctgcggcacgttcagcttgtcgtgctcttccttcatcttgaggaactccggcgggaagatcggcttgccgtcagcgtctttctcaaacttgaagcgcggggtggtgtcgtggcgggactgcggcttgtttgcgccgataacgccgccgttttccttaatgtggatgcttgcaatacggcctgcgtggctgttgatgaagtctaccgggtttacgcctgctgcgctgcaccagccgcagtcaagctggaaagccgtaacttccgggtcacatgcatcgatgagccagtcataaagatacttgccctcgtccacatagaactcgtcggtgtggttgtggtagccgatcttgatgccgtactgcttcgcaatgttgccgaggcggttgagttctgctgcaacttcttcagcttctgccttgttgcagaagttcgttgccgggcagatgacaagctttgcgcccaactctgcaaagtaggggagaacgccttcgatctgatccagaccgacgtgagcggaatcgaccttcaaattgttctctgcgagaaccttcttcatttcttcaaccggcacttccgtgaagtccgcagtgaactctgcgcctgcaaaaccaagctttgcaatggtcttcagcttctcaatcgggctaatcggctcggaaaccagggaataaacctgtacattgatattttccatgggaaaaaccacctttctgaaaattataacgtttgcggaaactccgccttaaaaaatgtgcggcgacacgaaatgccgccgcacacaaaatgtactgattaaaattagtcgaagtaaacaggcttgccggttctgttggactcatagatcgcatcgaggattctcgtgacgacataagcctgatcagccgtaacaaacagctcgccttcgcccttcagagccttgacccagatctcagcttccttggacttcggtgccggaccctgagagaagcccgggatgaaaccgctgaccttgttgccaacccaagaaatggtcgggtactcagcaacaacatggttcagacggacacggccttccttcgtatcgaggccgccctcggtaccagccagcatcgtgtaagcttcgccgtttgcagcgtagtcttcagccatgttgatagcccaagcagcgcgcagaacaatcgtagcgccgttcttcatcttgatgaagccaacagcggagtcttcaacgtcgtaggtctcgttgttccaggtatcgaactcaccgcggtagttgacctgaccctgatgcttagcatcgagcgtgtggccgagcttctcgaaggaagtgccgcaaacatagtcaacatcgtagttgttcatgaggaacagcgtgaggtcaagagcatgcgtaccgatgtcgatcagcggaccgccgccctgctttgccttatccgtgaatacgccccaggtcggaacgccacggcggcggaggtatgtagcctctgcatagtaaatatcgccaagagcgccggaatcgacaaccttcttagcaacctgattatccgggaagtgacgatactgatagccgatcgtcagcatcttgccggttctgtctcttgcttcgagcatcttcttagcgtcagccggggtagcagccatcggcttctcgcacagaacgtgcttgccagcctcaagagcagcaacggtgatctcgcagtgtgcaacgttcggggtcagaacgtgaacagcatcgatcgtcgggtctgccagaagctcatgataatcggtgtaaaccttagcgtccggggtgccgtactctttagcggccttttctgctctctcaagaatgaggtcgcagaatgcgcacatatctacgccttcctgctgggccatgcccgggaagtgcttgccgtttgcgataccgccgcagccgataaaaccaactcttacatttgccattggaattctcctcctaaatttacgccgaagtccatacggactcctaacgatttatttctgcttgtattttagaccattccagagcaaatgtaaagccctttttgtgaaaaaagcggatttgcacaagctttttttatgttgcttgtatcatttgcataaaaacttttgctttgttgcctgcgcgtccaaaaatcagccgtgcatttcataaaaaagagcaaaaaaagaggcacaccgcaaaaaatacggtgtgccctaaagtattcttacaacattctgcttataaaaacacagttaaaaccgtgtaaaacacgtatgccgatttgatatagcgctacgcaaagcagaaaaatcagtactgtctgccccagtagaccatgtgctttgccggcttgccgcagcaaacgcaaacatcagagaggtgctcttccttaaacggaatgcaacgggacttcacgccaccggttgcgtccttcagcttgtcctcgcacgcgctgtcgccgcaccacatggccttgatgaagccgggcttgttctccgcaatgtcgaggaactcctcatacgtcgtcgccgtgaaggtcttctcttcaaggttcttcagcgcacgctcataaagaccgtcatgcacagcctgcaaggccttttcaatctcgccctcaaggttatcgagcgaaacgaaaatcttttctctcgtgtcgcggcggacgagcacgcactggttctgctcaatatccttcggaccaatctccaaacgcagcggcacgccctgcatctcatactggctgaacttccagccgggggagttgtcggtgtcgtccagcttcacgcggaacttcgtcttcagggattcatacagcgcgtttgccttgtcgagcacgccgggcttatgctgtgcaatcgggatgattgccagctggatcggcgcgaccttcggcggcagtacaagaccgttgtcgtcgccgtgtaccatgatgatggcgccgatcatgcgggtggaaacgccccaggaggtctggtacgggtgctgcagggtgttgtcgcggcccgtgaacgtaatgccgaagttctttgcccagccgtcgccgaagtagtggctcgtgccgccctgcaaagcaacgccgttgtgcatcatcggctcaatggtgtaggtcgccacagcgcccgcaaacttttctttctcggtcttctggccggtcacagccggaatggcgagcacgttcttgtagaactcctcgtaggtgtgcagcatgcgcatggtctcttccatggcctcttctgcggtttcgtgcatggtgtggccttcctgccacaggaactcggaggagcgcaggaacggacgcgtcgttttctcccagcgcacaacggagcaccactggttgtagagcttcggcaggtcgcggtaagagttgatgatcttctggtaatgctcgcagaagagaatctcactcgtcgggcgtacgcacaggcgctcactcagcttctcgctgccgccttccgttacccaggccacttcaggcgcaaagccctttacgtggtctttttccttctgcaggagggattccgggatgaacagcggcatgtaaacgttctggtgacccgtcgccttaaagcgattgtccagttcatgctgaatgttttcccagatcgcgtagccgtacggctcgatgatcatgcagccttttacgctggagtaatccatcagctcggcttttttaacaatatcggtgtaccatttggaaaagtcaacgtccatggaagtgatgtcgttgaccatcttcttctgattcgccaagaaattcagtcctttcacgattcgtgcggcaaacgctgtgccgccgagcccaaagtgggcatattgtttcttattatacagggaattttcctgaaaagcaagagcggcggccatctttatgcgggctgcctaagattttatttaaaaaaacagaaaagaaggttcgtttcttctttccttgtacgattctatgcaatttgtaccaaagatacttatacataaataattcaaagttagcttaaactaatttacagaaacagagtaccaacaaaacagctgtccatcggaataaattaaatcagcgaaaaaaacaccgggaacagccagaaagccgctcccggtgttttcatatcgttttgcacaaggcgaaaaatttcacgcagagcgcaaaaattactgaccctgatgttcttcgatgaactgaacgatttcgccaaccgtcttgaggttttcaacttccgtatccggaatttctacgttgaaagcatcttcgatggacatgacaagatcaacaacagcaagggaatctgcgtccagatcctcaaccaggttggaatcctcggtgatctcggagggatctacgctgagctcctcagcaataatatcgataactttctccagaaccatttaattttcctcctatcgtgtagtatttgtcaagtactgcaccgtctgccgtatggacaaaacgccgcaggcatgatacaatcggggtgtacttcacatacattgtatggatgcacggcttatttgtcaatagcaattccgtattccgtgctaaatttttctgtttttaaaggagagccttaaaatgcagcttcgccgttttgccgtcatcgggcaccccatcgggcacacgatgtcgccatttatccatgatcgcctcttctccctcacaggccataagccggaatattccgtgctggatgtaccgtcccttacacaggcgctgcccgcattgcgcacgctcgacggcttcaatatcaccatcccccacaaaagcgacatcattcccctgctcgacggtatcgacgaaaaagcgaagcttttcggatccgtcaacaccgtgcgtgtcgaagacggcaaaatgaccggctacacaacggacggtgtcggctgcaaaaaggcccttgcgcgctatgggctcgattttaacggcgagcttcttctgctcggccgcggcggcgcggcgcgtgccatcgcatttgaagccgtgctcacggccgatgcaccgcatcttgatatcgtctgccgcgaaagctcgctcgaaaaagcacaggtgctcagcgatgaactcgcggagctctgccgcacgcgcagcaaaaccggcgtgttccgcgtgctgtcttatgacgagctcgcaaaggaaaccgagcactacgatctcgtgctcaacaccacaagcctcggtatgtaccccaaaaccggtgtcagtgctgtcggggaagacgtgctctcccgctgcaaagccgcgttcgacgccgtctataaccccggcaaaacgaaatttttaaagcttgccgcaagctgcggactcaaaactgtcggcggcatgggcatgctcgtctgtcaggcggtcgccgcgcacgagctctggtacggcgcgtcgtttaaggacagcgatatcgaacagctcatctgcgatgcggaagcggaaacggcacggcttttccgcgtataacgaaccgaaagaaacggggaacgggaaatggacaaaaaagtaaaaggtgaaatcataaaatcgggcaatatcgttttaagcggtttcatgggcagcggcaagaccacggtcggccgtcgcttggccgccgcgctcgatatgcagtttgtcgatatggacttgtacatagaaaagaagaccggcatgacggtcaaggagattttcgcagaatacggcgagctgcattttcgcgcgctcgagaccgagaccgtaaaggagcttgcgcaaagtaatcatttcgtcatcgccacgggcggcggcacgctgatgcagccgcagaacgtagagggcttccatcaaggcggcggtaccatctattatctcgacgtaccgctggccgccttgcaggagcgcctcaaaaacgataaacgtcgcccgcttctgcagacgccggaccgccgcgcggtgattgagcgccttttaaacgagcgccgcccgaaatacctcgcaagcgcggacgtcatcgtcgacgccggcgcgcccacgattgtcgttgtagagcgcatttgcgccctgcgcggcgagcccattgaaaaagcgaagcgcaaaaagccgggaaatacctccgaaaaggagcggccccaaaagaagcgcttccgcagaagaagacgcaaaaaaggaacttctcccggaacaccgcaagaaaactcttgacaaagcgcccgcgcggcggtatgattttaacacggcgatgcaggatagataaagcaaacctgcaaatcgcaaagcaagagtcacatataggatggttcaaactatgcagtccgttttattcacaagacgatttacaaagtattttagcgcacgattttataccgtgtgcttttcgtcgtatgtgaatataccgggcaacgcttgaaaacgcgcggaaaatttctgcgcggaggaatttgaagtattctgagcagtataaaaccaagcggagccaatgggcttcgctttttttgtgccgagagcggcagcggggcacggctcctataaaagaaaggtaagggaaaaaacatgatcatcgtactcaaagccaaccgcagtgaagaacaggtcaaaaacttcatttcgaatctcaccgaccgttatgacgtcagtgttaacacatgggtcggcacacattctaccgtgctcggccttatcggcgataccgctgcggtagacagcgagtacatcgccgcacaggatattgtagaaagcgttaagcgcgtgcaggagccgtataaaaaagcaaaccgtaagttccatccggaagatacggtcatcaagcttcctaccggtcaggtgatcggcgacggttcccttgcgctcatcgcgggtccgtgctccgtcgaaagcgaagcgcagatctgctgtgtcgcagagcgcgtcaaggccgcaggcgctacgttcctgcgcggcggcgcattcaagccccgcacctcgccgtatgcgttccagggccttaaggcagagggcctcgagctcctcaaaaaagccaaggaaagaaccggcctgcccatcgtcaccgagattatgagcatcggccacctcgacctctttgaggacgtcgatgtcattcaggtcggcgcaagaaacatgcagaacttcgagcttttaaaggagttgggtcacgtgcataagccgattcttttaaagcgcggccttgccaacaccatcgaagaacttctcatgagcgccgagtatatcatggcgggcggcaacgagcaggtcatcctgtgcgagcgcggcatccgcacgtatgagacattcacccgcaatacgctcgatatttccgccgtaccgatcttaaagcgcctttcccacctgcccgtcatcgtagaccccagccacgccagcggcatcaactggcttgtcgagccgcttgccatggcagcggcagccgtcggcgcagacggcctcatcatcgaggtgcataatgaccccagccgcgccctgtgcgacggcgcacagtccctcacgccggatcagttcgacgtgctcgcaaagaaagtgcagaaggtcaccgaaacggtgaagagcctgtaaaaatttacccgaaagggagaacgatatgcaaatcgcaatcattggtctgggtctcatcggcggttcgctcgcaaaggccctcaaagaaaatacagagcacaccgtcataggctttgaccgtgacgaaaacaccctgctcgacgcgctttccctcggcgccatcgattccgtcggcagcacgtcattgctcgaaaacgcggacgtcgtgtacgtctgtctgtatcccgcagatgtcgtgcgcttcgtcgaggaaaacgcaccgcattttaaagaaggctgcattgttacggatgtatgcggcatcaaaaatcaggtctgcggcaaattaacggagatcgccaaaaactacccgttcgtttacgtcggcggccaccccatggcgggcaaggagcgcagcgggttcgatgccagtgaggcaagcctcttttataacgcttcctatattctcgtgcccggcgaagctccgcaaagcgccacagataccctcgtgtcgctcgcaaaaagcatgggctttggcactatcaaatactgcacgcagcaaaagcacgatcgtatgatcgcctatacgtcccagattccgcacgttttggcgtgcgcttatgtcatgagcccgcgctgcgatgagcacagcggcttttccgccggcagttaccgtgacgtttcgcgcgtggcgcgcatcaatgcggagctgtgggcagaccttttccttgcaaaccgtgaggaattagcggacgagacggaagaactcgtgcgcaatatagaacgtatacgcgctgcggtggcgaaaaacgatcgggcagggctcgtggcgctgctttcctccgcacgtgaaaaaaaggagaaattcggataatggtgatcgagattaaaacagataaaccgtatgaagttattgtggaagacggcgttttggaccgcgcgggcgaaaaaatcgccccgctcgtccgccccggcagccgcgccatgattgtcagcgagacaaacgtcttcccgatatacggcgagcgtctaaaagcttcgcttgaaaaagcgggtatccacacggcggagttcgtctttgaagccggcgagccgcagaagcagctttccaccgtcatgcagatttacgaagcgcttgcggaaaacgatttcacgcgcagcgacatcattgtcacgctcggcggcggcgtagcgggcgatatgggtggcttcgcggcggcaacgttcctgcgcggcattgatttcgtgcaggtgcccacgtcccttttggcgcaggtagatgccagtgtcggcggcaaaacgggtgtcgatttgccgttcggtaaaaacctcgtcggcgcgttccatcagccgcgcctcgtcctcgccgatcccaaaacgctctccacgctgcccgatgcctatttcacggacggcatgggcgaggtcatcaaatacggctgcatcgcagacgccgcgctgttcgataaattggagcagggacaagtcatcgaccatttggaggaaaccatctgccgctgcgtgctgtgcaaaaagcactttgtcgaggaagacacgaacgacaaaggccggcgtatgattttaaacttcggccacacattcggccacgcgctcgaaaagcttacgggcttctcgtcgctttcgcacggccttgccgtcggcatcggtatggttatggcgggcgaagtgggtgaaagtctcggcgtcacggaaaaaggcaccgctgcgcgtatccgccgcgtgctggaaagctatggcatgcccaccgagtccgcgtttgatttcgccaaagttgtggaagcaaccgcgctcgataaaaaaagctttggcaaaacgctcaacctgatcctcttaaagcagatcggcgaaagcgttattcacccggtggacagaaactacctcgtactgcgctataagcttgccgccgagcagaaccgtcgcagaaaattgaattgatttttaggaaggcagcatcattctcatcgtgctgccttatgtcaaatataaagagataaatttatgtagaaacaaggtgatactatggcagaggtgacctaccgccccgcccacgttaagggcgaagtgcgcattcccccaagcaaaagtgccgcgcaccgcgcattgctttcggcggcgctgtgcaaaacgccgtgccgtgtcgggcccattgaccacagcgcggatatggaagctacattaaacggcgtgtgcgccatgggcggcacggtgaaagcggaagaaaacggcgtgctgtgcatcgcgccgggcacggcaccccaaagcgtcacggtcgattgcggtgaatccggttccacgctgcgctttctcatccccgttttcgccgccctcggcatcgaagcgacgtttgtcggtcgcggcagacttcccgagcgccctatcggcgtttacacagaccttctgccgcagcacggcgtaacggtcgagactgccggcggtctgccgtttcacatcacgggcaagcttcaaagcggcgatttccgcgtgccgggcaacatcagttctcagtttataaccggtttattattcgctttgccgctgctcaaaaatgattccaccgttacgctgaccaccccgctcgaatccaaaggctatatcgatttgacgatagaggtgctcgcgggcttcggtgttaaaattgaggagaccgagaccggctggtacatctccggcgggcagacgtaccgcgcagagcactataccgtcgagggcgattggtcgcaggccgcgttttttctctcggaagccgctgtctccggcggccctatccgcctgctcggcctttctgaaacctctctgcaaggcgataaagcctgcgtccatctctggcggcagttcgggctttctgtcaccgaagaaaacggcgtttatgttgccgaaaacaaaaatatagataagccctaccgcggcctgcacggcattgcgattaacgccgcgcaaattcccgatatggtacctgcgctcgccgtcacggccgcgtttgcggagggcgagaccgtcatttcccatgcggagcgattacacttaaaggagtgtgaccgtctgcttgccatggaagcggcgctcaaaaacctcggtgcagacattaaagccgtgccggacggccttatcattcacggcaagcccgcgcttacgggcggcaaagccgagggcatgaacgaccaccgcgtcgtcatggcgctcgctgccgccggttgtgcgtgcacagtcaccgtcacggacgcggaaagcatcaaaaaatcctaccccggatttttccgggatcacaaaaaattaggagggatcgccgatggcatcgacctggggtgaaaacatcaagctgtccattttcggcggcagccatacggaagcaatcggcgtggtgctcgataatctcccgccgaacgaaaaaatagacatggaaaaaattcgcgtgcagatggcgcgccgtgcgccgggcaaggacaagaccgccaccacgcgccttgaggccgatgagccgcaggtgctctcgggcctcttcaacggcgtcacaacaggcgcgccgctcgcggctatcatcgcgaacaccaatacgcgttcgaaggattattccgatttaaaaattcacccgcgtcccggccatgccgattacaccgcgtctgtccgctacgacggcgcaaacgacattcgcggcggcgggcatttttcgggtcgtctcaccgcgtgcctcgtgttcgcaggcaccgtctgccgccagatattagagcgccgcggcatcacgatcggtgcgcacgcttatgcggtcggcagcgcaaaagataccccgttcgatcccgtaaacgtctcaaaagaagacttaaatgccttaaatacccgcttttttgcggtcaattcccccgaggccgaagaaaaaatgcgcgccgagatcgaagccgcacgattggacgcagacagcatcggcggcatcatcgagtgcgccgcagtcggtgtcccggcgggcatcggcagtcctatgttcggcggcatcgaaaatgtctttgcatcgattttatacggcatccccgccgtcaaaggcgtggagttcggcgcgggctttgatgttgcctgtatgcgtggcagcgaaaataacgacgcgttttactacgacgaaaatggtctcgtccgcacgaaaacgaacaacgcgggcggcattttgggcggcatcacaacgggcatgccgattctattccgcatcgccgtcaagcccacgccgtccattggccgtgaacagcacacggtcgatctcaccacgaaaacaaacgccgatttaaccatccacggccgccacgacccgtgtatcgtcccgcgcgccatccctgtggcggaagctgcggcagccttggcgctgatggatttgctgcgttaaagagagtagaaaggagcgagcaaaatgagtgaaaataagtcctttgatgaactgcttttgccggttcgcaacgatatagaccgcattgataaagagcttttaaagcttttcacggaacgcatgcagtgcgcggagcgcgtcgcggagatcaagcgcaaggcgggcattcccgtcttaaatgccgcccgcgagcaggtcattttagaccgcgttaaaaaagaagccggtgagtacggcgacagcgccgtcgcgctttacagcgccatcatgagcatcagccgcgcccgccagcacaatatgctgaaaagcggcggggtattgcgcgacctcgaacaaaattccccaaagacattaaaagctgacccgcgtgtcatttgtcagggcgcagcgggcgcgttttcccacagcgccgccctgcgcctgtttccggagcagaagccgatctttttgcccggcttccgcgatgtttttgaagctgtccataacggcgcgggcgattacggcgtggtgccggtcgaaaattccgatgccggcagtgtctctgaggtctatgacctcatcatgaagcaccgcatgttcatcgtcggtgcggcggatattcccgtgcgccactgcctgtgccgcgcaaaggggacgggtgcggtcaaaaaggtgctctcgaagcacgaggccctcgtgcagtgcagtgcgtatctcgcggcacacgacattgaaaccgaagcctattccaacacggcggccgccgcaaaattcatcgccgaaacccgtcccgagggcgtcggcgcagtctgctctatgcaggcggcggaggaatacggcctcgaagtcatcgccgccgatatccagaataccgataacaactgcacgcgcttcatcgtcatttcgcgtgaagccgttttgcccgaagacgcggaaaagatcagcctgtgcttctctctgccgcacaccccgggctcgctgtgccatacgctggagcgtttcgctctgctcggcctgaacctcacaaaaatcgaatcccgccccatcccggagcgcaatttcgagtatgacttctacctcgatttcaccgggaatgttcacgatgcgcagacacttgcgctcatctgcgccctctccgacgagatgccccgtttctcgttcctcggaaactacaaagaaagctgagttgaaaatggcagttacctttatcaaagtcacggaagaagaacagattgaaaaaatagccgagatcgccgcacccatctggcacgagacctacgactgcatcaacggcgttgcgtccacagattacatgatcgaaaaattccagtccgtcccggccatccaccgccagatggaaagcgagggctacgtctattatatgatgctcgacgacggcgtgcccgcgggcttcatcggacttgtgccgcacaaagagggcaaaatgttcctaagcaagctctacgtttccgccgctcatcgcagccgcggcctgccgcgcgccgcgttcgatttcatcgaaacgctctgtcaggcggaaaagctccccgcaatctatctcaccgtcaacaaaaagaattttcacgccatcgaagtctataaatacttcggttttcatcaaacggacgccgtcgtcaccgacatcggcagcggcttcgtgatgaacgactatatcatgcagaaagacctgtaaacgcaagccgcaatatgccaagctgtaattttgtgcccgttcgtatccttgacaaaaataaaaactgaaaacattgcgaacggtgtgcaaaaatttccctcggccgttcgctttttctttctttttcggaaaatctgtgctatactaaaaacaacattttaccttgagtgaggtatacgcatgagcgagagaaaagaagtctatgttttgggccaccgcaatcccgacaccgattccatttgttcggcgatcgcctacgcggacgttaaaaataaagaaaatgacggaaatcactatgtcgccgcccgcgccgggcagatcagctccgagacaagctacgtcctccagcgcttcggcatgcgccagccgacctacgtcaacaacattggcacccgcgtgcgcgatatggagatccgcaaaattcccggcatcaacgagggcatttccatgaaaaaagcatggagcatgatggcggagatgaacgccgtcacgctgcccatcgtcgatgcaaacaacgtgttagacggcatcatcaccatcaacgacattgccacgtcctacatggaaaatcaggacagtaccatgattgcaaaagccaaaacgccgtactgcaacattttggaaacgctggaagccaaaatgctcgtcggcgatcccgatgccgttttcgagcacggcaacgtcgtcattgccgtcgcaaacccggacgtcatggaaaactacatcgaaaaggacgacatggtcatcaccggcaaccgttacgaatcgcagctttccgccattgagtccggcgcgggctgtatcctcgtctgcctcggcgcagaggtctcccgcagcatccagaagctcgcgcgcgacaataactgcgccgtgctcactacgccgcttgatacgtacaccgttgcgcaccgcatcagtcaatgcatgccggttaaggcgttcatgcgtacaaaagatctcgtcacgttcaccccgagcgattacaccgatgccattaaagataccatgcagaacacccgcattcgcgatttcccggttatcgataaaaacggcaagtacgtcggcatgatctcccgccgtaacttgcttggcatccgcaagcgctccgtcatcttagtcgatcacaatgagcgcagtcaggcggttgaaaatatcgaaaacgcagaaattttggaaatcatcgatcaccaccgcatcggctccctagagacgatggcgcctgtgtatttccgcaacgagcccgtcggctgcacggcgaccatcatctattccatttataaagaaaagggctttaaggttccgccgcagatcgcgggtcttctgtgcagcgccattttgtccgatacgctcatgttccgttcgcctacctgtaccatgctggaccgcgccgcagcggaagcgctcagtgtcattgcgggcatcgattgccagagcttcggtatcgaaatgtttaccgcaggcagcaacctcaaggataagactccggaagaaattttctatcaggattacaagaagttcgagttcggcgacgtcacgttcggtgtcggccagatcaacagcatgagcggctccgagctcgatgagctggagcgccgcctgcgcccgtacctcgaaaagtcctgccgcgagcatggtctctccatgatgttcttcatgctgacgaatatcatcgaagagtccacgcgcctcatgtgctacggcgagtctgccgatatgctcgttgaagatgccttcggccgtgcgccgaaagcgggcaccatctggcttaaaggtgttgtctcccgcaaaaagcagctcatccctgccttcatcgatgccatcagcaaagaagccggcggcggtgtgtgattttcctcgcgtgccctctccgatttcggctatatggccgattggaccatcccgcggcacgatcgactgcgtttcgatatcatgagcggcaaaataaacgaataatttgtgaggaaagggtcggcccaaagcggtcggccctttttgcatacagaaaattgcgaaaaataaaaaataggactggatttttttgaaagactgtgttataatatttgctgttgaacagagtatgggcccgtagctcagctgggagagcgctgcgttcgcaacgcagaggtcaagggttcgaatccctccgggtccaccaaaagtccaccgtaattctgatagaattacggtggactttttctatgcccgaaaaccgcttggaattaggcttttcggttgtttcagcacatgagtaaaccccgcggcagggcaattctgcggcggggttttgcgcgttttatggttgtccagactttctgcgccgttgtaatcactgaaaatcaacagaaaacattatgatataggtttcattgtgcgcgataaactttcttcatcgaacaacgcgtatgtttctcaagattttagggccttcataaagaacgctttcagcttctcaaatgggattacgtccatctgatcataaaggtcggtgtggtttgcaccggggataatgagcaattccttgttatcgccggtcagcttgctgtacgccgtctcactgaaataacgggagtgcgcattttctccgtgtaccagcagcacggcagagcggatttcgctgctgtactgcaagatcggcatattcaggaacgacagcgaggaggtcacattccagccgttattggagttcaagctgcgggggtgatagccacgtggcgttttgtagtaggcgtaatagtccttcacaaactgcggagcatcctccggtaacggatcgacaacaccgcctgccaatgcataagtaccactcctgtaatcttccgtgcgctgtgcattcatggcttttttcttctcaaagcgtgcctgctcagaatcctcactgtcaaaatagccgttggcgttcacacgggtcatgtcgtacatggtcatagcagcggtcgctttaatgcgggtatcgatggtagcggcattgatcgccatgccgccccaaccgcagataccgatgataccgatgtgctccggatcaacattctcctgcacggagaggaaatccaccgctgcgcagaaatcctcggtgttgatgtccggcgaagcgacatagcggggtgtaccgccgctctcgccggtgtatgacgggtcgaaggcaatcgtcaagaagccaagctccgccattttctgcgcgtacaggccggaggactgctcctttaccgcaccgaacggaccgctgacggcaatggcgggcaacttgccctctgtgcccttcggcgtgtacatatccgccgccagtgtgatgccatagcggttgtgaaaggttactttcttgtgatccaccttgtcacttttcggaaacaccttatcccattcctgtgtcagattcagtttttccatattcagacctccttgcctgttgccttaaaatatactgtgttgtccacggcatccaaccattcattggaggtttcgtcccccggaacctctaccgccagatgagagaaccagctatccggtgcagcgccgtgccagtgcttgacgcccacagggatatttaccacatcgccggggcgcagctcctgcgccggtttgccccattcctgatagtagcccgtaccggctacgcagacaagaatctgtccgccgccgcttttggcgtgatgaatgtgccagttgttgcggcagccgggttcaaaggtcacattgtaaataccgacctgctgcgtagaaagcggtgcgagatagctttgtccgataaagtattttgcaaaggcgtcattgggtgcgccgatgggaaaaaccatttcattctgatgcttggtttttgcgtcggcggcatcgtcctccgcccatacctcctttgccatacggaaggccgcccacgccttgggccagcccgcataaaatgccgcatgagtcaggatctccgcaatttccgttttggtcacaccgttgttctttgcagttgtcaggtggtactgaaaggacgaatccgtcagtccctgtgccatcaacgcaactatggttacaatactgcggtctcgcagagaaagcttgtcttctcggctccacacctgcccgaacagcacatcatcattcaattccgcaaatttgggagcaaattcccccaaagcctctctgcctgccgtttgtttgattgccatggctcacacctccttgcccatctgataagcttgctccagcgcaatatgacctgcgatctctcccacgccgtttacgccgcctgcaaacactgtgccagccagcgcacagcgggggaagcagtctacccagccctgcacagctttttctgtgcccgcaaaggtttccggtgcgtcctctgccgccgttgccagcagataggctttcgtaaaggcgtagtccgtatcgaacaatgggttggcacgatccagcatagtcttgagctgaccgctgacgcagtaatagtagacgggtgttgcgaacaccagcacatttgcatcgtgcattttggcggcaatttccacggcatcgtcttggatgacgcagtgccccaactttaggcaggcaaagcagcctttgcagaagccaacctgcttttctcgcagatatacggtttctacctgatggcccgcctcccgtgcgcccttggcaaacgctgccgccagcgtttcggagttgccgcccttacggggacttgaggaaatgattagtacctttttattcatcgtagaacactccttgcacttcggtttctcttgtgttattataatgataacacttaaacttaactttaagtcaagatattttttgaaaattttcggaggaatttttatgtattcgatcggacaggtggcggagatgttcggaatgcccatctctacactgcgctattatgataaacagggacttttcccgaacatggaacgggtatccggtatccgtaagttcagtgaaaccgagattgaggcgcttcgggttattgagtgtctgaaaaaggcgggaatggagattcgggatatcaagcagttcatggattggtgtaaagagggtcctgtcacatatccgcagcgaaaggccatgtttgaggaacggaaagcccacatggaagcggagatcacacggatgaaccgcactctggatatgctgaaattcaaatgctggtactatgaacaggcaatccgggacggaaatgaggaaaaactcgccgccatgattcccaatgagttgccgaaggacatccgtgcaatttacgacagctcccacgaaaaataacactctcctgcacctgcatggtaattgaagggcaacacaagaatgtattgcacccccttaacgggtttctatcaaaattagagtcatttgccataagtccaccgtaattctgatagaattacggtggactttttctatgcccgaaaaccgcttgaaattaggcttttcggctgttcaggcgcataagcgaaccccgctgcaggcaattctgcggcggggttttgtgcgttttatgtggattgaggcttcatgtaccgtcatgatcgttaaacggctgaggtaatcgttaaatcacagaggcattcgttaaattacagggataatcgttgaatttagaagagaattaaaaaaatcaaaacacgcacaatctctgtttgcatagtttcatttttgggagaaaaacagcataacaggttgtgttcgcatggatttttaacccgtgattgtcatgctgcaccgccgttatacgcggaaaatcaccgattcatacgggcgcagattggggccggtgtagccgccctcgcggtcgtaggaggagagcagcacttcgccgttctgcggaacgagcgcggcggggattttcgatggttcggcggagaaattgtggaaagaaagcagagtttcgccgttatagctgcgctttagggcgaacagcgtatcggagccggtttccggaatttcgaggtcgccgcgtgagagcgcgggactgcttttgcgcagtgcgatgagcgctttgtagcagctgaaaatggagtgcgggtcgtttttctggttttccgcgttgatctttgtgtagttcggattgatgccgagccacggcttgcctgttgtgaagccggcgttttcggttgcgttccactgcatcggcgtgcgggcgttgtcgcgggagatcatctgcgcctcttttaaggccacgtccggcgtgtcgcccgccaaaatgtgctggtggtaggtgttttttgcatcggggtcgttgtaatcttcaatgtacgggaagcgcatgttcgtcatgccaatctcttcaccctgatacacgaacggcgtgccgggcagggagtgcagcagcatcgcgagcattttggcggaaacctcccagtattccttgtcgttgccatagagcgagacctggcggggcttatcgtggttgctgaaaaaccgcgcccaccagccgttttcctttaaggcgtcgtagtcgttttgaatatcctgcttcatttttttcggcgaccacgtgttgatctcgacgatcggcgcgacgaacgggatggccatatcgaactcctcgcggtcggtgttgacgtagcgggcgagctcctcggcgtctttcgacgccacttcgcccacggtcatgacgttatatggcgagaacacgcggcggttcatgtcgcggatataggcgtgcgtgccggggcgaccgttgatgagactcgaactgaacgaatagccgtccggctgcggcggctctgcggaatccgggaaatcctgcggcttatcaaggtagctgatggcgtccactctaaagccgtccacgccttttttcacccaccattccatcatggagaagatttcttcacgcagcgcggggtttgcccagttaaggtcgggctgctttttggagaacagatggtagtaatactgcccgcgctccggtacaaattcccacgcgctgccgccgaaaacggaggcccagttgttcggctccttgccgtttttcgggtcgcgccaaatgtagtagtcgctttttgggttatcgcgcgaggttttggattcgaggaaccacggatgctcgtcggaggaatggttcacgacgaggtccataatgaccttgatgccgcgcttgtggcactctgcacacagcgcgtcccaatcttccatggtgccgaactcgtccatgatctcccggtacccggagatgtcgtagccgttgtcgtcattcggcgagcggaacacgggcgagagccacagcgcgttgatgccgagcgccgaaaggtggtcaaggcggcttaaaatgccgggaatatcgccgataccgtctccgttagaatcctgaaagctgcgcgggtagacctgatacacgataagatccttcacccaatcttttttctgttccatacaactttacctcctgtgcaatatccatgtatattgcgcaaagcggcctttcggccaagtgtttttaccattataacacagtttacaagaatttgaaaagtatttgagaaaaatagtgaaattgtgctttaaagtataaaggggaaagctgggcgcttagcttccaaacatgcgttaagttttctatactgcggtgctcgtttgccggggtgaatgcagagaagccggtggtaaaaatgccgaaacggtttcagtcgccgaaatgtacacttataagaatataggtgtatagaatggagacctataaaacagagtgtaaaccacaggacaaaggatatagggtgaaaagaacggtgtgccgggtgcggcagccgttttttaaaccttttttcgggtgttgtagggcagtatagacaacatcggtttaaaataaatagaaacagtaaacataatattgataaaattagaatgaatagcggatgaaaacgaaatgcttgtaattgaaactattgaaaatgcccataaatcgcaggcttatgcgccttaaagtatcaaagtgtacaaaagcatataagcacattaaaattacataattttaaaatgggaaaccgatttcacattgctccccaaaatgcactttttgttgtatatggcattataaaagtaatattattaaaaatatttggagaaaatactgaaaagtttttgaaaacttattgacaaatcgtgaatacggtgctattctatgtacataaaaaagcgagaacggaattaaaatttggttgtttttcacttagctctacagtttaaagctatttattagcgttggtcttcggctatggagcaatagaccgatgctatcgcagagcttgaatgttctgagtaccgccgctttcagcggaatgcacacatcgccgtaccggatgctaaaaaggcgagcgtgtgggggaaaggtacatcagtgaacggacaagcgctgtaagataaatagggggtcatgaattttgcaaagcaaagttcatggcgggattcctacaaattttgcgatttgcaggaattcaaaacaccggggatcacaaagtggggtatgctttgtgacctcaacacattatgaaccgcaggttcacaaaacaagagaggtattgtattatgaagaaaaagaccttagctgttcttctgtcggcggccatgctcgtcaccggcatcctgagcggctgcggtggcggcggcagcacaagcagtgcagcatcctccggctccaccgacagcaccagcagcgccgcggatgagtcttctgcttccgaatctaccggctccggcacgaatgccgccgcaggtcaggttacggcggttggcacgaaccgtgacgaaactctgatcgttgagactgcgtctccgaccgacactccgggccagttcaacagctacatgtccggtacgaacatgaacttcggtattcatcagctgatgagcgcacacctttgggaaatggacaccgtttccggtgagcagttccctgaaattgcagccgatatgggcaccccgaacgaagactttaccgaatggaccgttaagatccgcgaaggcatcaagtggtccgacggtgaagacctgaacgctgacgacgttgtcttcacgttcaacatgatcaaagaaaacgacaagatcggtgcttccgcagcgaccaacctctacatcgataaggttgagaaggttgacgattacaccgttaagttcacgatgaaggaatccttcccgcgctttacacagcgttacggcatcaccgtatggggcaccgattaccgcatcgttcctgagcacatttactcccagcaggctgatgttacgacctttaaggacgagcagccggttgtagcaggcccgtacaccgtagaagactatgactccaacggcgactggatcctctacaagctccgtgacgactggaaagaaagtacgcttggcgttgtaggcacagagcactacaactacagcgaagatcaggttccggcagaatatgtttggttccgttatcttggcgactcctcctccagacagatgcagatggtcagcaacgaagttgatgtcctctgcgaagttacgatggaagagctgcaggcaatgcagagctctaacgacaagatcaacgcatggtacaacgagttcccgtatgcaaccatggacgacccgggcgcaaagggcctggtgttctctcagggtcagggcgctccgtacgacaaccctgacttccgctgggctatcgttctggcactggatatcgaccagatctccatgaacatcttctccggcgcaggccgtgcggctccgattccgctgctcaacaacacccagtatctccaggatacatacaccatcccgatgcaggaatggcttgagaactttgagcttgaccttggcgatggcaccaccattaagccgtacgacaccggctatgcaaagcgcatggctgagaagaccggcgtaaccggcaccgacgaagagctcatcgatatgttcggcgcaggctggtggaagcacgatccggaagcagctgaaaagctcctcatcaaagccggctttgagaagaaggacgacggctggtacttcaatggttccaagttcacaactgaaatcagctaccttgctgatacagaagctcagtccgctcgcggcgctcaggctgcttacaaccagctgcaggcgttcggcctcgattgcaccattacttccaagagtactgctacttgggacgttgacggtggtcagggcaactaccagatcggcacttactggccgtccgctggtattctgaaggacttctactccgctatcagcggttgggacagccgtctgatgaagccgctcggcgagaccggttccggtcagggcgctcgttggaacgatgagactgttgataagatcctcaccgagcttgcgaacaccgacccgaccagcgacagatcctatgagctgcatcaggaattcctgaaggaagctgttaaggaaatgccggctatcaacttcatgaacggcacaaagttcgttccgaccaacagcacatactgggaaggctacccgaacgccgagaacgcttataacggtccgtggtggtggtggagctgcttcaagtacatgctgccgaacattcagccggttcagggctaatttgatagcttgaatacttggagagaatccaatagcactaatctgaaatgatctgaagaggatgagggcgtgtgccgaatacccatgaccacgtccgtcatcctctttctcatttcccgaaatatcctgttgtaatttgtctataagataaggaagtgtggctgtgaaattcaaaacattctttttacagcgtatccttgcgtgggcgttgacgatcttgatcggcgttacgttcatcttcttcatcccgcgtatgttcccttccgatcctgttgagaacatgatcgcccagatgcaatcccgttccggcaacatggatccggcagaaatggaagcgctacgtcaacaacttagaattcaattcggtctcgatggtactcttcttgagcagtatggctacttcctgctgcatggccttttgcagtttgactttggcccgtctttgatgagctatccggagccggttacctctattatcggtcgtaacctgccgtacaccctcggtttgtccctgaccaccacgctgcttgcatggatcgtcggcaacttcatcggtttgcttgcaggtttccgcaagaacaagacatcctctaaaatcctcgaaggcatcgcgatctgcatttatccgatcccgtacttcctggtcgctcttgttctgcagattgtcttcgcgttcgtcctcggctggttcccaatccagacaacgctgcttacccgcggcacgttcgcacagtggctcggttcgcttctgaaagcgtctgttctgccgggcatctccatgcttctgctcggcacaggctggtggattatctctatgaagtcccttgccggcacgactgcagaagaagacttcgttttatatgcacgttaccgcggcatttccgaagcgaagatcggtgcgagctacgttttccgtaactccatcctgacccagattacggctttggccatgagccttggcggcgtcttcggcggttccatcatgacagaaatcatcttcggttacccgggtgtcggtacgctgatccaaaatgcgattttgcagtccgattacaacatgatcctcggatgtatcacgatttccatcgtggcgatttccacggcgacgttggttgttgaccttatatatccgttcatcgatccgagaattcgttacggttgataaggagggaagttgtaatgaaaaaatttgcaaaattttggaaagcagccaacttccgcctgaagttcggtcttatcgtgaccctgatattctttatcatcggtttcgttgtttactatgtaccgcacgtgaacccgttcacgttcaatacctacccgaataagctgggtgcttccgcagaacactggctgggcactaccagtatgggtcaggacgttgtgtggctgctgattgaagctatccacaactcgctcgtcatcggtctcatcgtggcatttctcggcacggttgtcggtgtttttgtcggtctgctttccggttttgccggtggccttttagaccgcgtgctgatgattgttacggatacgttcgttgttattccgtctctgccgatcctcatcatgatgacctccctgatgaagggcagctccaccacgatcgtgatggctcttgtgcttgccatgttcgcatgggcttggccgagccgccagatccgttccatggcgctgagcattaaagagcgcgactttatccacacggcgaagttctccggtgaaagcacggtgcagatcgttgtgaccgagattctgccgtatgcgctgacctggtcgctctccaactttatgaacgctacgctttccgctatcggttccgagtcgagccttgctgttctgggtctttcccccggcaaccttgtctccctcggtaacatgattcagtgggcaagaagctacaacgcaattttcaacaagcagtatctctggatcggcgcaccgatcgttgcaacggttattctgtttgtcggcctgttcttactcattacgggctataacgattacttatccatgaagagaggcaggtaacgaatatgttaaaagtcgaaaatctgtccacttcttacaagctcatcgacggtgacgttcacgtccttaacgacctgaactttgagatccacgataacgagatattcggcatcgccggtgaatccggctgcggcaagaccacactgctgaagaccctctacgatattatcgagttcccgctggagatcgacaaaggtaaggttatcctcagcggcgaaaagaatggacaatccttttcttatgaatccggaaacattcagaagacctggtggaacaacatttcttacgttccgcaggccgcgcagagcgttctgaacccgatcgttcgcctgaaaaagcagtttttggattctatcccgcaggaagaccgcaagaacgaaacgaaagagcagaccctcgcacgtgttgcaaaatacctcgaggagctgaatctttccccggatattttggaatcttatccgttccagctttccggcggtatgcgccagcgtgttatcatcgcgcttgcgacctttatgtccccgaatgtcgtgcttgccgacgaaccgaccaccgctctggacgttgttgtgcagaagggtattttgaagatgctgatgcgcttgcagaagcaactcaagaacaccatggtcatcgtcagccacgatatgggcgtgcattatcagattacggaccgcatggcgatcatgtattccggcagcatcatcgagcttggcccgaccgatgcgatctttaatgacccgatccatccgtacacgaagatgctggttgactccctgccgcgcgttggcgataagagccagaaggtcggtattccgggtcgtccgccggcactgaagaacccgcctccgggatgccgtttcgcagcacgctgcccgcatgctacggatcgttgccgtcaggagattccggagttcattgaagttaagccgggccgctttgcagcctgccatttgctgaagaaggagggagagaagaatggctgataaattgcttgaaatcaagggcgtcagcaaaatattccgcgtaggcggtatgattcgtggcaaaaagcttgttgcggttgacgacgttacgctttccattgacaacgataagccggtcatcctctccgtcgttggcgaatccggttgcggcaagtccacactgtgtaagatggttctgcgtctgcacaactcggatatgggcgacatcgtgttggacggcaaatcttaccgcgataagaaaagctacgacgcaaagcagttcaagctggaagtgcagccgattttccagaacccgtatgagtctttctccgcacgtaagccggtagactcttacctgttcaacacggcgctgcgccttggcattgcgaaaaacaaagcagaagctacaaaccttgtagatgacgccctgaagagcgtcggtctctctctggcggtcgtaacgggcaaataccccacccagttctccggcggcgagctgcagcgtgtttccattgcacgtgcgcttatcacccgtccgaagctgatcattgccgacgaaccggttgcggctatcgatgcttccatgaaaatgaacatcgtcaacctgttcaaggagttgaaggataagtacaaggtctcctttatctacatcacccatgacctttccacggcgtactatgtatccgattacattgcgacgctgtaccgcggctgcctcattgagtacggcccggccaaggagatcatggacgagcctgcacacccgtacactgagcttttgatgagcgctgtgccacgtatcggcgacaagtgggcggatgacgacatggcgttgccggatatggagtctaaggaatattccatcacctactgcaagttcgcaccgcgctgcccctatgcgacggatgaatgcagaaaatcgcgcccgggcgaaacctatctgaacgatgtcagaaaggtcatgtgcttccacccgctgattcagccgaagaagtaaagcctctgcgcacaacaaaataaacaagctacacttgccgaccccctgaaggcccatgaagccgacatttcctccgtcattgctttatgggtatcagggggtcaatttttgctttgtgggcgtgctttaaaacggttgaaaacatgtcgggattgttataaaaagagggtaaattcggcggaataaggattgaagtttgtcgcgaaatacggtatactgattcacaagcggcactgcggggttcgcgggccgaattttagagttttggggagaaaatacaatgaaaacgaagacacgctttgcgtggaaacaatttctgaaaaatcttgcaatcatcgcgatcccggtggctttgcagaacatgctgacgacaaccggcagcatgatcgacaccatgatgattgcgccgctgggtgaaacgaccgtgggcgcggtgggtctttgcgcacagttttcctcgctgatgtttgcgggctactggggctttttcggcggcggcatgctgtttttctcgcagtattggggtgcgcaggatgacgacggcatcgaccattcctacggcttgacgctgacctgcatgatgattgtcgggcttacattcggcgcctttgcgatttttgcgccggaaaccgtgatgaagctctatacggataaggagagcattcaggtaattggtgcggaatatctgcgcatcatcggcttcggttaccccgtgcaggtgttttccatggcgatgagcgctctgctgcgttctacggagcgcgtgcgcatcccgctgtttgcgtcaatcgcctcggtagcatcgaatatttttcttaactgggtattcatttacggaaagttcggcttgccggagatgggcgtgcgcggcgcggcgctggcaacatccttggcggcggttatcaacgttttggtcattttgattttggcgcgtgcgcagaagtacccgtatctgttccactttaaaaagcatttccgctggaataagaagcaggtgaaaatctacttcgtcaagtgcttccccatcatctgcaacgaagtgctcatcggcgtgggcaacatggttatcaacgttgttttgggcagacagtccgaacaggccattgcggccatcgcggtgttccgcacgctggagggcatggtcatcagcttctttgccggtttctcaaatgcggcttccgttttggtcggcacatgcgtgggctccggcgagttggacgcagcctacgagcgcgcaaaacgccttgtgttcctgtgcggcagcacgattttgtgcgtatgtctggtattgctcggtatccacaagccgctgctttctgcgatgagtctttccggcgaatcgatggagatcggttcgcacatgctgatgatttactgcgtggcggcggttattcgcatgtgcaactgggtgcagaacgatacgtatagagccgcgggcgacgcggcgttcggcacaatccgcgaaatcgcatttatgtacgcgatggtgctgccgctggtgtgcctgacgggccttgtgtggaaagcgccgtttcttatcgtgtttgcgtgctgttatatcgacgagccgatccgtctcattttgatgcagcggcacatgtactccggcaaatgggtgcgccccgttacgccgcagggcatggaagcgttgccggcgtttatggaaaagcatgggcatcataagaaggcggcgtaaacaacttaaagacagaaaaaaggacttccgaaaagaagtccttttttcgtgcgtatgaaatttagtggatgttttctttgatccaccttgcgtcatcggcgatgcacttgtcgtgctcgtcgtagaagccttcgcgctctacgacccagaacgcttcaaagtcctgctcgtcgagtgcgtctttgatgtcctgccagttcatgttggactccggggcgcccatggggcactgtacctcaaactgcttcttgccctcgggactgttcatgtgcgcgttgaagccgtccaaaatcttctggcgttcttcaagcggcatttccttgacgttggcaaacggattggcgtggcctgcctcttctgccgcgtggcgggaagccggtctcgggccggggccttgaaccttgctgttttcctttacatggatggcgacaaagcggtttttatagcggcgtatgaacgaaggcggatagcagccgccgttctgtgcccagccgcaatcgagctgagagtagcactttgtgctgttgtcaagcaggtgctcaagcagcgttttgccctcatccatgaagaattcctgactgtggttgtggtagccaatcttgatgccgtacggctctgccatttctgccatttcgtcgagcttgtgcgcgacttcgacggcttctgctttgttgcagaacggcgtgcctgcccagatgacggccttgccgccgagctcggcaatctttttgacgatctcttctgtcggctctgcgtggatggagacaacctcaaggccggtctctttcagccattttttgatgtcctcgatgtcgttatcgaggtcgaccggcagcaactcgacgcccgtaaagccgagggacgcgatggtcttgaatttatcaagcagcgtgggcccgaggccgagatagctcgcaatgccgccgaaagaatatgtaccgatattgactttcatgtaaacttccccaatcgtaacaaatttgtgaaaaataaattcatatatcaagtaaaatcataccatatacacaaataagcgtcaatcgaaattatggggagcgatggaaaatttgcaggctattttatggcgaaattgtcggggacaacgcaatttttcggaaatttcggcgtgtcggcggtttcataccacgctttgtagaccggaatgagctctgttagggtgattttttccgggcggtcgaggaaaccaagtaaatttgccatacggccgaggagttcttcgggcgtgaaacgcgtgcgcagaacgccgatgtcgaggtcgcgctcgcgcttacttaaacggcggccgtcgcgattgacgagcagcggaatgtgcccgtagtgcggcggtgtgtggccgagtgcgtgaaagagctgaatttggcagccggtggaagggagcaagtcacgcccgcggacgacttccgtcacgcccattaaagcatcgtctacggtgacggcgagctggtacgcgtgcacgccgtcgctgcggcgcacgatgaaatcgccgaacgtggactgaacatttatattttgcgggccgcagtatagatcttcaaacgtgacggtgtcctccggtgcgcgaaaacgcaagcttgggcggcgcgtgcggcttttttcttcggcttcggcgggcgtcaaatttcggcataaaccggggtagcggaacgtgccatcgcccgcatggggcgcggagaccgtgtgcagctccgcgcgggtgcaaaagcatgggtaaacatcgtttttggcgcggagttcacttaatgccgattcgtatagctcgcggcgcgcgctttggtagtagggggcgtgggtgcgcttgtggccggggccttcgtcccaagtgaggccgagccatgttagatcgtccattaaaagctcggctttttcgcgtgtgcagcggtcggggtcgaggtcttcgatgcgcaggagcatctcgccgttttggctgcgcacggaaagccacgcaagaagcgcgcagcagaggttgccaaggtgcatgcgccccgaagggctgggcgcgaaccgcccgcggacaggggtaggttgtgaggtggacatactaaaaatcctttcggagaaaatttgaaattataaaatcattttaccgcagattttgggcgcgcgcaacggttttgggacggagagtgaattgacaggtgtgcaccaaacgggtaaaatgatatagcaaagttttgcacagcccgcggcaacggcggttaaaagtttcgcccgccttttcaaaggcggcggaatccaagggcagcgcccttggtcgaactctgcagagctcgaaactctttagactttagaataagaggatatcaaaatgaacgaaaaagaaatctcggaaattcgccgccgattcagggcggataaaagcaatatcacccatgtgcgcgggtgctacgtcaacgaaaagcaggaaatcgtctcgcaattcgaccagccgctctccctgctgccgcaggaggaatgcgaaaatatgctttccgtgctgcgccgtacgctttccggcacgctcggcaaaaatctcatcgaaatgccgtttacgactgcgcaggtcattgacagcgatgagcaccggctgctgatggcgctgcgcgactcaaagcttaccgatgaagaagccgtacggatgttttttgagaaggtcatcgcatcatacagacccgagggtacgtatctcattttgctcgcgaacgatacatacgatgtgccgtaccgcgcaaaggacggcgaaacgctggaggatgcctcggagaatatctataattacgttctgtgtaccgtctgccccgtgaagcagacaaagcccgttttggggtacgacgtgccggaaaatacgttccacaaccgcgacattgattggcttgtttccgcgccgcagctgggctttttgttcccgtcgttcaccgaccgcagcgccgatatttacagcgccatgtactactgccgcagcgcttcggaaagctacgatgaatttatagacgcggtgttcaaccgcgaagcgcccatgcccgcagaggagcagaaaacgacgtttggcacgattttgggcgatgccttaaatgacgcgtgcagtttagacgtcgtacagaccgtgcacagccgcctttgcgggatgattgaggagcacaaggcgagcaaggatccggagccgctgaccattacgggacgcacgatgaaaacgatgctgaccgcttgcggcgtgccgagcgagaaagccgaaaagtttgagaaagcctgcgcggagcagttcggcgcggacgcggcactcagcccacgcaaccttgtggagacgaagaaattcgagatcgaaacgccggaggtgcaaattcgcgttgaccccgagtacagcgaatggatcgagacgcgctacattgacggtgcaccgtacatcctcattcccgccggcgcgggcgtgcaggtgaacggcgtgccgatcgccatcactcgcccggacgtggagtatgaggaggaagaatgatggaattcaaagaactgaatatggaggttttaaaatcgattttgaacgcatccgtatgaggtggttttccgtgcccgtgcgcgacgacgagggtaaggtcatcggctacttcgagcgtcacgaaatgcactgggatttcagcgacctcggtaagcctgttgcggtgccgaaactggaagcaggatattaagacaaaacaagcggcgcacagggtgtgaaaactctgtgcgccgctgattttatgtgcttttaaatttactcgaaatcagcgttcatgaagagctcgagcattttgaccgtcgcttcgatgtccttttggctcacgatggcgttcggaccgtgggtgtagcgggtgacgaccgagaagccaatcgttttgataccgccgccgacgagcgtcatggcgcctgcgtccgtgccgccgacatagatgacgtctttctggtacggaacgttgtgttctttgcacagcgcgatggatttattcacaaggccttcgtcgctgatggaaccggtgtcggagattttgatggcgacgccgtggtcgagcgcgttgctgccctccaaatcgcccgggcggtcgtggcacggggtaacgtccaccgcgacgccgatgtccggctgaatacgctgcgccgtgacctgcccgccgcgcgtgccgacctcctcctgcacggtgaacgcgaggtagatgtcgttcttcggctttttcacgttcatcatcgctgccagcagcatatagcagccgacgcggtcgtcgatggcctttgcggtgatgtagcccggcgcaagctccgtgtacgggccctcatagcatgcaacgtcgccgacatcaacgtattttaaaacttcttccttgttgtgcagaccgatgtcgatgtagcaatcggtatagcgcttatagccgccggcgctcagcttttccggcgggatgcggcttgcgaccacgccaaccacgccgttgcggaagcggacgcggctctggtacgttgtaaacgtccaacagcagccgagctccttaaacataatgcggccgtcttcctcaattttaatgacctgaaagccgatctcatcggtgtgggcggcaagctctatgcgctttttgtgctcgcccgtgcccgtaaaataggcgatgacgctgccgtttgggtcggtggtaatgtcgtcagcaagcggggctaacttttctttaatatagtctgcaacggcggtctcgtagccgctgacgccgtgcagctgggtgagttcttcaaataacttcatacgggttttcctcctctaaacggggcagaaagccgtagtccggcgttattctgccatgacggacgcaatgtctttgcagagtgcgtccacgttttcgtccgtcgtcgcccagcttgtacaaaggcggacggcgctgtgtgtttcgtccacgcgcgcccaataggaatacttgtacttttccgcgagcttttcgagcgcagtatccgggaaaatggggaactgctggttcgtcggcgagggggcaaagaatgcgcagcccgcgtcttcgcacgcttttgcaatgcgctttgcctgccgcacggctttttcgctgatcttgaaataaagatcgtccgtgaaaagctcgtcaaactgaataccaagcagacggcccttagccagcatgccgccgcgctgcttgatgtggtagcggaaatccgttttgagcgccgggttcgtgattacgaccgcttcgccgaacaaagcgccgaccttcgtgccgccgatgtagaagacatcggaaagcgcgcagagatccgcgagcgtcacgtcattttcgggagccgtcaggccgtagccgagacgtgcgccgtcaataaagaggtacagcccgcagcgcgtgcagacatcgtgcagggcggtcagctccgctttggaatataacccgccgttttccgtgggcagggagatgtaaacgagcttcggctgcaccatatgctcaaacgaggcatcgttcacgtgcgccagataggcgctttccacctgttctgcggtgatcttgccgtccggggtggagggcagaggcagcactttgtgacccgtcgcttccaccgcgccggtctcgtgcacgttgatgtgtccggtgtccgcactcagcgcaccctggtgcgggcgaagaatcgctgcaataacggtggcattcgtctgcgtgccgccgacgagaaaatgcacgtccacgtcctcgcgtccgcatgctttgcggatcttcgcgcgcgccaaatcgcaaatttcgtcctcgccgtagccgacagtctgcatcatattcgtttcacaaaggcgctttaaaatgttcgggtggcagccttcggtgtaatcacagttaaagtaaatcaaaatttcgcttccttccgtatcccgccgcacagagaaaatctccgccgaacggaactgaatgcaagcacagacgagtgagcttgcaaaaatacacccgtttgcgctatacgaataaatataccatgcaaaactgggtttgtaaagcatgcgttatgcaaaaatcagggcctttttgctttctgtgggtacggctcaggtacgtttgtcagctctaagatgtaatcggtggaaacggtgtagtaccgcgacagacgaatgagcagatcaatgggcaactgccgcacgccgttttcgtactgcgaatacgtgttttgcttgatggagaggaaatccgccacctgcttttgcgttaagtcgcgatcctcccgcaggtctcgaagacgcataaaatacctccaaaatttcgttgatttaacttaattttagagttctcattttgagatattgacatttatctcgaaatgagatattatcatagtaaattaaaatctgccgcaataaaaaacttggcagatatgaggaggaagagaaatggcatacgagtacaaggaatatgagtatgtggaaaactgtttgatgaaagccggagaagttttgaaagaagtgcaggtcgtgttagcgataattacgggaatatgcggaattattatcgcggtcggcgaaaaggatatttacggcgagttcagttttcttctgtttttgactgcgcttattccctatgtagtggcaaccgccattcttatcgggcttgggtggttaggcgacattttttgcactgcttttgcggatattcatttttatttgagatcacttaacaaggttgctcacggttctactaatgatgagaagaacggaataaacactatgccatctatatccgatcaaaataatgatacttggaaatgtcgtaactgcggtcgtattttaaagacatatcaaacgacttgtacttgcggccaaaaaaaatccgaaaattaaaactcaatacagcaaagaaggcagagaaaatacaactctgccttctttttatattgcggcgcaaagtgccgctgtgggcgcatttttacggcgaaaatgcttgacaaagcggggcgtctattgtataatacaaaagctgtaaagaaaaaaactttacagcagggcgcttgaaattggaaacgcccggaaacggagcgaactatggcaaaggatctgcgcatcacgttcctgctggatttttacggcgacatgctcaccgaaaagcagcgcgaggtcgtggaatgctattataacgaagacctttctttagcggagattgcagaggagaagggcatcacgcggcagggcgtgcgcgacggcatcaagcgcgccgaacagcagcttcttgaaatggaagaacggttgggtcttgcaaagcgcttccgcagcgtgcaggaagaactgacgcagatctgcgaccacgcgttacagatcgaagcggaaaacgaaaagaacggcggcgacccggtcattcggcagaacgtggagagcattttgcgctccgcaaagaagctgacggactgagcggcgcggctctgaaaggatttttacatggcgtttgaaggtcttgccgataagctcggcaacgcgtttaaaaagttaaaaagcaaaggcaagctgacggaaagcgacgttaaggaggccatgcgcgaggtgcgtttggcgcttctcgaagccgacgtcaactacaaggtcgcaaaggactttaccgcgcgcattacggaacgcgccgtgggcgaggacgttatggaaagcctcacccccgcgcagatggttatcaagatcgtcaacgaagagctgacggctttgatgggcggcagcgaagagcggctgaaaatgcccgcgcacccgccggctgtcatcatgatgtgcggcttgcagggtgccggtaaaacgacgcacagcgcaaagcttgcgaaaatgctgaaaagccgcgacagccgtccgttgctcgttgcaggcgatatttaccgcccggcggcaatcaagcagttacaggtcgtgggcgcacaggccggcgtacccgtctttgagatgggcaccgaagacccggtgaagatcgcgcaggcggctgttcgccacgcgcgcgactacggcaacgattatgtcatcatcgataccgcaggccgtctgcagatcgatgaagcgctcatgaatgagctgaaaaatataaaagaagcggtgaaccccacggacattctgctcgtggtggacgccatgaccggccaggaggccgtgaacgtcgcaaagtcgtttgatgatctgctcgacatcacgggtgtgattttaacaaagctcgacggcgatacccgcggcggtgcggcgctttccgttaaagccatcaccggcaagcccatcaagttcgccggcacgggcgaaaagattgacgacctcgaggttttccaccccgaccgtatggcgagccgtatcctcggcatgggcgacgtgctgtccctcatcgaagacgcacaggcgaaaatcgatgaaaagtccgcggcgcgcaccgcagagcgcatgatgcagaacaagatggacttcaacgacctcttggagcagttccggcaggtgaagaagatgggcccgttaaagggcatcctctcgaaattgcccggcatcaacagctcgaagcttgatgaaatggacattgacgaccgcattatggaccgcaacgcggcgatcatcctttccatgacccccgaagaacgcgcaaagccggagcttttgcaggcttcccgcaagcgccgcatcgcggcaggctgcggcatgaaggtggaagacgtcaaccgtctttgcaaccagctcaagcagatgcagaagctgatgaagcagttcggcggcaaaaagggcaagaaaatgatggcgcgtatgggcggcatgggcggtttcggcggcccggatatgggtggcatgggcggcttcccaatgtaaatgcgataaagaaacgaatttcatttgtttctgatgcaagacgtatatttgaattgtaaatattgccgacgaatcgttggttaatagataaaacttattttttataatatggaggaaattaccatggttaagatcagacttcgcagaatgggtgctaagaaggctcctttctaccgcatcgttgttgcagattcccgttacccgagagacggccgtttcattgaggaaatcggctactacaacccgatggaagagccgagcgttgtaaaggttgatccggaaaaggcaaaggcttggatggaaaagggcgcacagccgaccgataccgttaaggcactgttcaagaagcacggtgttatctgattgcccgtcttctcgtttgagaaaggaacaatcttatgcaggaattactgaaaatcatcgcgcagggtcttgttgaaaagccggaagaggtttccgttacactcgatgagcccaaggaagacggttccgtcgtctatcatcttcacgttgcggaagaggacatgggcagagtaatcggcaagcagggccgcattgcgaaagcgattcgcgttgttatgcgtgccgcagcaacacgcagcagcgaaaaggtcgttgttgagatcgattgatcgaaagagggacgcacgggcttcgtgcgtccctctttatattaaaagagaggaaggctttcgctgcggcagagccgaggaaaacacatgaaaaaacaatttctggaagcgggaaggatcgtgggtacgcacggcgtacgcggcgaaatgcgcgtggaaccgtggtgcgattccgccgattttctgaaaaaagtgaagaccctgtattttgacggcggcaaaacggatgccgggctcctatcttcccgcgtacacaaaagccttttgctggtgcgcttaaagggcgtggaaagcgccacacaggccgacctgtacaggggcaaaattctatatcttgaccgaaacgacgtgcgcctgccgaaaaaccgctacttcgtggaagatctcatcggccttcatgtcatcgatgacgcaacgggcgcggaatacggcacggtgcaggacgttttcgagaccggtgcgaacaacgtgtaccgcattgtaaacggcgcgggcgaggaatttctgttccccgccgtggatgccatgatcgcgaagacggacattgaaagcggaaagctgtttgtaaagcccattccgggtattttcggcgacggcgcggagaccgtgcccgtaaacgccggggaggcagcggatgcggattgatattgtgacacttttccccgaaatgtgcgagaatattttgaacgagagcatcatcggccgtgcgcgcgcacgcgggtatttgcaggtgtgctgtcaccagctgcgcgaccatggtgagggcgtgcacaagcgcgtggacgactgcacgttcggcggtggaaagggcatgcttttgatggcgcagcccatagcgaaggcgtttgacgagatcatcgaacaaaccgccgtgcgcccgcatattgtgtatatgtccccccgcggacgggtcttagaccaggaaaaagtgaaggagctcgccaaaaacgagaatatcatcgtgctttgcgggcattatgagggtgtggatgagcgcgttttggaggaatacgacgtggaggaaatctccatcggcgattttgtcctgacgggcggcgagctgcccgccgtaatcctcaccgatgccgtggcgcgcatgctgcccggcgtgctttccgaagacgtgtgctttgaggaagaaagccattatgacgggcttttggaatatccgcagtatacccgtccctctgcttggcgcggcagagaggtgccgcaggtgcttttaaacggccaccacgaaaacatcaaaaaatggcggcgcgaacaatctttgaaggtcacgcagaaagcccgcccggacctctttgaaaaagctgagctgactgcggaagaaaaacgcgctttcggcagaaaataagcggattttaggaatgtttaaccctctgtggcgaactgattttacgaaatgttttcaacaagcagagcaaaatgcacaaacacggatcgtttcatagcgatatgccacgggcatatatccaaaaatggggtaccccgcttgacggggggacaaattatgctataataacttatattgaagcattttgagctttagaatcatgtttgacattcagagtatgtaatgtattacttacaggagagtgaatcgcaatgtgtgttaagaaggacgttttggttcagaatcaggttggtctccatgcaagaccggcaactttcttcatccagaaggcaaacgagtttaagtcttccatctgggttgagaaggatgagcgccgcgtaaacgcaaagagcctgctgggcgttctgtctctgggcatcgtcggcggtacgtcgatcgacatcatcgctgatggttccgacgagcaggaagctgttgacagcctcgtggctcttgttgaatccggctttgccgaataatttcagcttgtcaaaacggcgcctatcggagcatttccggtaggcgtttcttctttctcagtcgcttagtgactgagccgcatggaggtgcgcatggtacagcttacggaagaaaaaatggcgcatatcaaagagctgcgcaaaaaggcgatgaagctgccgcttcacccgggcgtgtacatcatgcacagccgcgatgataccatcatctacatcggcaaggcgaaagcgcttaaaaaccgtgtcagccagtatttcggctcggataaaaaccataatgaaaaggtgcgccgcatggtctcgaatgtcgagtatttcgagtatattctgacggacagcgagtttgaagcgctcattttggaaagcagtttaatcaagcagcaccagccgaagtacaacatcctcttaaaggacgataaggggtacagttatattaaggtgacagcgggcgactggccgcgcatttcggagacgaagcaggtcctgaatgacggcgcaaagtatatcggcccatacctttccgcgtggacaatcaaggacaccgtggaggaggcgcggaagattttccgtctgccgtcctgcacgcgcaaattcccgcaggagatcggcaggggccgtccgtgcctcaactactacatcaagcagtgctgtgccccatgccgcgggcacgtgagccaaaaggaatacaacgaggccgtgcaggaggcgcttgatttcatccgtggcggcacaagcgattccgtgcgcacgctgacggagaaaatgaacgaggcggctgaaaatctcgattttgagcttgccgcgcgcatccgtgaccgcattacggccatcaacaagctgaaagagcgccaaaaggttgtcgcaagccgcgtgccggaacaggacgtcatcgcgctcgtgcttggcggcgaaaaggtgagcattcaggtgttccgctttgcgggcggcagactgtatgaccgcgaatcgtttttattaagcgccgacgacgagccggagcagatccgcagcgaatttgtcatgcaatattattcaatgcgcgataagatcccgcccgtcatcacgatagacggccccgtcaacgacgacggcgtccttgaagaatggctgacgaaaaaggcggagcgccgcgtgaagttccacattccgcaaaagggcgaacagaagcagcttgtggaaatgtgccgcacgaacgccgcggaagcgcttgcgcaggctatgggccgcgccacgggccgtgagacctccgcgctcgatgaactgcgccagcttttaaacctgcccaaaacgccggaatatattgagtcctacgatatttcaaaccttgcgggcggcgagaacgttgcgggtatgatcgtgtttgaaaacggccgcccgctgaaaagcgcgtatcgcaagtttaaaatcaagactgtcatcggacaggacgactacggcagcatgcgcgaggtcatccgccgccgttttgaagaataccgcgccgccgataagcccgagggcttcggcagactgcccgacctcattctgctcgacggcggcaaaggacacgtgggcgccatacgtccgcttctgcgcgaaatgggcatcgatgtgccggtatacggcatggtaaaggacgataagcaccgcacgcgcgccatcacggaggacggcggcgaaatcgccattcagtctacgcgcgcggtgttcacgctggtgtcgagcattcaggacgaggtgcaccgctttgccatcggctaccaccgccaacagcgcaaaaaggcgaccatctccaccacgctcacgtccattccgggcatcggcgaaacgcgcgccaaagcgctgatgaagcactttacaaccatacgcgccgtcagcgaggcgacggaggaaatgctggaggaaacgcccggcatgaacgcccctgccgcccgcgccgtctaccgttatttccacagcgaagaaaacgacggggaataacgttgttcccgcgtatttttcgacgtttctctgcaaaaactgcgcaaaaacggttgacatatttctattcaaatgagataataacttgaagtgtgtccgtatatgttttttagatttcggacacggacttccaaaagagaaaggagtgttcggctgtgcgtatcataaccggttcccgccgaggcagaaaattgaaaacgctcccgggcgatgctgtgcgtcccacgccggaccgcgtaaaagaggcgcttttcaacattttgcagtttgatctggagggccgcgtgtttctcgacctgtttgcgggctccggccagatcggtctcgaggcgctcagccgcggcgcaaagcgcgctgtgttcgtagacagcgccaaggcatcctgcggcgtcgtgctggagaacattcacaccacagggtttgaaaacgaagcgcaggtgatgaacgcggagtatgcttcgtatctgctgcgctgcaccgagaccttcgacatcgcgtttctcgacccgccgtatcgcacgggcacgctcacaaaggcgctccttgcagtcacgccgcacatgaaccgcggcggcatcgtgatctgcgagcaccccacggacgaagagctgccggagacggcgggggaattcgtgcgcgtgcgcgactaccgttacggaaaaatcttgctgaccgcgtatcgccatcaaagcatggtgtaagcgcaaaaaggcggtatatcaatgagaatagggatctgtccgggcagctttgacccggtcacgctgggacacatggacatcatctcccgtgcgtgcaaaattttcgacaaagtcatcgtcgcggtaccggtaaacccggataagcgcgcgagctttacggtggaagagcgcatggaaatgctgcgcaccgtcacggccgatatggaaaatgtagaggtagactgcgtgcgcggtcttttggcggattacgcaagcgaaaagcatgcggctgccattgtgaagggtctgcgcgcaatctccgactttgaatatgaatttcagatggcgctcaccaataaaaagctgaacccggagtttgaaacgctgttcctgccgaccagcattgagcacatgttcctcagctccagcatggtcaagcagattgcgggcttcggcggcgatatttcccattttgtgcccgagtgccttttagagaaaataaatcagagactttgccgcacggcagactgaatgcggctaaaaatacgaaaggaatggattttttatgagcaacacgcaggcaaccgtagaagatttgatcgatgaattgaccgacgtactggagaaaggctggcaccttccctttgtaggcggcaaatcgtgtatagatagcgaagacgcaaagcagatccttgatgagattcgcgaggcgatcccgtccgaagtgcgcaaggcgaaggccatcgtcgcagaccgcgcccagatcatcagcgaggcacagcgcgaggccgagaccatcgtgcgcgtcgcagaggagaaggcaaaagcactcgtcaaccaggaagagatcgtgcgccaggcacaggcaaaggcaaacgacatcatggcgcagacgcaggagaagttccgcagcatgcagaaggcctccaacgactatgtggaagatctgctccgccgcacagacgacgcgatgagcgccaaccttgcagagttgagaaagacccgccagtccatccacggcacgagcgtacagcagtaatttaagagctttaaacggcagttcgcggcagctgggcgagctgccgtttttgttaaaatgagcgaacggaaacggcggtttaaagtctttagtccagttttcttcgagaaaacttgcggattcttagggcagcgccctaagtcgccattcgcaatggcgaaatccttttgcctatccaaaaactaagaaggtaacctaaaacgtccactggacgttttaggtgtagagaacccggttgcatggggtttcctgaaaaggcggcagcgccgctctttttataaatgacctacgttttccacaaaaagcgtgtaaatggagccgcttccgaaaaccgggaatgtgaacaaactgcaaaagtttttttgcatgagaatgcacagaattttcaacatgacgctattttgccgaaaatcggaaaatatacgaacaaaacccaagaaaaatatcggaaatccgcgctttttcatcgaacatggtaaacataaatttttttgccgcgggttgattttctatgtgggataaggtataatggacgtgcaagcagcgaaaaccctgcggaaaaccgcatgggctttggattttcattgccttttcgccccgcttggcgctcatcagcccggcttttttcgggtaaagttcaatgaggagtgtctggcggaacgcatccgttccgccggacaaatatatcatgagtgaaattcattttgagcataaaccggtgctgttcaaagagaccatcgagtccttgaacatcgacccggaaggcacctatatagacggcaccgcgggcggcggcggccactccggcgcgattttacagcgcctgacaacgggcacgttgctttccatcgaccgcgacccggacgccattgccgttgtgaaagagcggctcggtaaatatcccggctccgtcgttgccatgggtaacttctgcgatatggacaagatcgcgttagagcacggcatcgttaatgtcgacggcgtgctgctcgatatcggcgtttcgtcctatcagctcgataccgcagagcgcggcttttcctaccacgccgacgccccgctcgatatgcgcatgagccaaagcggcacctcggccgcagaccttgtaaacacactctcttggcaggaattggccgagatcatcagtcgttacggcgaagataaaagcgcggtgcgcattgcaaagggcattgtgaaagcgcgcgaagaaaaaccgattgaaactacattagagcttgcggagatcatccgcgaaagcgtgccggcagcggtgcgccgcgcggagggtcatccggccagaagaacgtttcaggcgctgcgcattgcggtaaacggcgagctggacgcgctcaaaaagggtcttgcggcggcgttcgggctgttaaagtccggcggcaggctttccgtcatcacgtttcattcgcttgaagaccgtatcgtcaagcagcagatgaacaagtggtgcgagggctgcacctgcccgaaggatttccccgtgtgcgtgtgcggcaacaagccgaagggcaagctcatctacaaaaagggtcttgcgccgagtgaggaagagcttcgcgaaaacccgcgcgcccgcagcgcaaggctgcgcgttattgaaaaactgtgagattttgaaagattagggtatccctgagagaatacagctgaatttgttgggataagtttccgaaaggaggaaacaacatggcatctacatcaaacgcatacgattttgatcttttcgacagcagagatcacggcagcgcggcaccgaagcttccggagccgaaagcgccccaaaaacaaaaacagaaaaacaatgtggtgaagctggatgaaaaacagctgcgccgcagtcacagacacagtgcaaatacggtcaaaatgctcatgaatcttgcggtggtgctggtcatcgtcggcgccatcggtgcggtggtgttcagtcaggtgcagctcacggagctcaccgatgagatcaacacggcgaacgagagcctttcgcaggagaaaagcattgccattcagctcgaaatgcaggcggcctccaagctcaatacggaggagatcgagcagatcgcgcgcgaaaagctcggcatggaaaaggtagcggacgggcagacctcctacatcagcctcacgcaggatgatgagggcaccgtagtgcaggccgaaaagacaccgaacctgttggaccgtatctggcaggtcttgcagtcgctcttttcctgatttagcctttatacatacgaattttttgcggatacgctgctattttgcggcatgaaagaatacaaatgggttatgcggcccccggcagaggggaatttgagaggagagttgagagtttattcttaactctcatttttcggtatacggcaacttttggctgcgaatgaagggcgcagcagaaaggacggcattttttacatggcaaaatcaaatcgttccggcgtctggcagcgcacaatggtcatcgtgggctttgtgctggtgctcgggtttggcgccgttatcacaaaccttgtccgcctgcagcttgtcaacggcgaaaccttaaagaccgatgcggtcgaccagagtttgcaatccacgcagcttacgccctcgcgcggcaccatttacgacgccacgggcacaaaggtcttggcgcagagcgccagcgtgtggacggttgccttggagccgaactacatcgacgaaggcgacgacgtgaagattgcaaagggcctttccgaaattttagggctcgattacgacgctgtcctgaaaaaagcgcagcagaacagctactttgtctatgttaagcgcaaggtggagaccgaggtgcgcgatgagatcgtgcagtatatcaaggacgaaaagatcggccgcggcatcacgctgatggaagattacaagcgctattatccctacggcaccacggcttctacggtgctcggcttcacgggcacggataaccagggtcttgcgggcattgaaacggaatacgacagcgagctttccggcacggcgggccgccttgtcagcgcgaagaacgcacagggcgatgacatgccgttccagtatgaccaatacgtgcaggcacaggacggctacgaccttgtgctcacgatcgacgagaccgcgcagagcatcgtagaaaagcatctgcaggcgggccttgaggcctgcggcgcgctggagggcggcacggccgttttgatgaatgtcaagaccggcgcgattttggcgctttccacaaagggcgactacgacccgaacgacccattcaccatttcgcaggaggccgaggacgccatcccggaaaaggtggaagacgcgctgcaaaaggcgcaggaaaaggagcagcaggaattaaacaccttacagcttgccatcgataacgccgagaccgacgaggcgcgcgcggaagcgaaaaaagcccttgcggattacgagcgcatcgacgtcaccacgctgcgcgatgagctcaccgatcaaatgtgggccgaggcgcagaacaagcagtggcgaaacaaagccgtcagcgatacgtactaccccggttccgttttcaaaatggtcacgggctccatggcaatggaatccggtgtggtctccgaagactccacgtacacctgcaccggccagtgggtgtttgatgattccaccatcgaccccatcagctgttggtaccacgccggtcacggcacggaaacgctggtggacggcgtttgcaattcctgcaacccgtacatgatctggctgggccagaaaatgggccgccacacattcttcaatttctttgaagccttcggctttacgcagcgcacgggcatcgacctgcccggcgaagcagacagcctttattttagcgaagacgagctcaatatcgtcgagcttgcaacgtcttcgttcggccagaatttctccatcacaccgattcagatgatcacggccattgctgccgtggcaaacggcggttaccttgtgcagccgcacgtcgtggaccgcatgctggacagtgacggcaacattgtcaaaacgactgatacaagctacaagcgtcaggtcatctccgaagatgtctccaagcgcatgacggctattctccagaaaaacgccacaagcgaaagcggcaaaaacggctatgtcgccggttaccgcgtggcgggcaagaccggtacgtccgaaaaagtcgcactgtattatcaggatctggcagagggcaatgaccgaggcatgcagtacgtcgtttcctacggcggctacgccccggcagatgacccgcagtacgtcttgctcgttttctacgacgagccgcagattggcggcgcgtccggcggcacgcaggccggcccgatcttcgctgccatcatggaagaggtgctcccgtacctcggcgtagacccgcagtatacggaatcggaatatgaaaatctctccgctaccgcgccgaacgtcattggcatgaccatggcagaagcgaaaagccatctggaagagcagggcttcagcggcacggttgtcggcgacgccgaagacgacgcgctcgtcacggtgcaggtgccgtctccgggtgcatctatcccgaaggaaggcatggtcgcgctttacactgaagagccggatcccgaaacgtatgtggaggtgccaagcttcatcggctatgatatcgatacttgccgctacttggcgggccttgccgatgtgcaggtgctcgttgtgggcgacggcgattccggctacgcacaaagtcaggatatcgcagagggcaccaaggtcaagcgcggctccgtcatccgcatttcgtttgtcagctccggcggcgtcgaagcggcgggcaacacctcaacgaacaacgaagagtaaaaacatacattgagagggtaggaaaggaagttcataacgtatggatattgtactgtattgccttgcaatcgtcattgcggcggtcatcacagggctgctcggctacttcatggtgccgtttctgcacaagatcaaatttggccagaccattcgagaggtcggccccagctggcataaaaataaacagggcacgcccaccatgggcggcatcatgttcatcatcggcagctccgtcgcggcggtcatctgcatcgcatttttgtggctgaacggcggcgcggaaacgcagctcatgctcgtcaaggtcacggcgggtgcgctcatggcggtgggctttggtatcgtcggttttttagatgattacatcagcatcaaaaagcatcgcaacctcggtctcaccgagattcaaaagctcattttgcagttcatcatcgtcggcgcctacctgctttccgtcgcacttgcgggcggcaccaccgaaacggttatcccgttccttggctccgttgacctcggcttcttctactacattctggcggccgtcttcatcgtcggcatggtcaacgccgtgaacttcacagacggcatcgacggcctcaatacgtccgtcacgctcgtcgtcgcactcgtcttctctgttatcgcgatgcttttaaaccgcgtggggctttcactttacgcggcggccatcgtcggtgcgatgatcggcttcctgttctggaacgccaacccggctaaggtcttcatgggcgatacaggctcgctgttcctcggcggcgcagtgtgcgcgctggcgttcggcgtggatatgccgattctgctcatcctcatcggtattatctatattgtagagattctctctgttgtcttacaggttacatactttaaaatttcgcacggcaaacgcattttcaaaatggcgccgatccaccaccactttgaaatgtgcggctggaacgagaataagatttgcttcgtgttcagcggcgttacactttttgccggtatcattggcgtacttttggcggtgttcggctgctaaacgcctgaaaatgggataaaatagaaatcaactgaaaaaaaggaggtttgcagcaatggcgcagacaagacgctccacggcgcgcgggcttgaacaggtcccaagtcgccggttatccgccgtgcccgcagaagaggcggcatccgaagccgcaaggcgcggcaaacggcgcgggcgcatcaaatatagaattttcactttgggtctcggccttgacatgaccatgctgtttttgatccttgtgctgcttgccgtgggacttgtcatgatgttctccgcaagctatgcctacgcgtattactactacggaaacagctattacttcattctccgtcagggtatgttcgccttggtcggtgttgtgctgatgcttgccatctccacgttcgattatcaccagctgcataaactgaacctgcccgttttcgccgtctccattcttttgcttttgatggtgctcgtctttaagggcacaaaattagcgccgaacaaaggcggcgcggtgcgctggctgaaccttggcttcgtcgaattccagccgtccgagatcgcaaagttcgcgctcatcttgatgtttgcgcacctcatcgcgctgtacggcgaaaggatgaaaaccttccgctacggctttttgccgttcttcggtattttgggcctcgtctgcgtgctcgtcatcgcggaaaaacacgtttccgccaccatcatcatctgcctcatcgcgtttatcatgatgttcgtcggcggcacaaagttccgctatttcgccgtcatcggcggcgcggcggcagccgccatcggcgcgctcgtgctgttttcctcaaaatttgcctacgccatggaccgtgtccacggctggcttgacccgttcaacccgccggagggcgtcgatacatggcagacggtgcagtcactctacgccatcggctccgggcagttgctcggcgtcggcatcggacagtcgagacaaaagtatctctacatcccggagccgcaaaacgacttcgtttttgccgtagtgtgcgaggagctcggcttcatcggcgcgcttatcgtcattatcctgtttgcgcttttcatctggcgcggcgtatatatcgcgctgcatgcgcgtgaccgcttcggcaccatgctggcgcttggcatcacgttccagttcggcattcaggctatcctcaacatctgcgttgtcacaaacaccatcccgaacaccggcatcagcctgccgttcttcagcttcggcggcacggcgctcatcatgcttcttgcggaaatgggcgtgcttctgtcggtctcgcggcattccaatacagaaaaaatgtaaaaggggtattcaattatgcgtgtgttatttgcaggcggcggcaccgccggccacatcaatccggcgcttgcggcggccggttatctgcgctccaagcagccggatgccaaaatcctgtacgtcggcaacaagggcggcatggaagagcgtcttgtgcccgcagcgggcttcgatttcaaaaccatccgcatctcgggctttcaacgtaaattaacggcgaagaacatccgccgcaacatcaaaaccgtgttccgcctgttctcctcgtccatcgagtccgagcgcatcatcaaggcgtttaagccggatatttgcgtcggcaccggcggttacgtcagcggccccgtcattcgcgccgcacagaagctcggcattcccaccgtcatccacgagcagaacgcctatcccggcatgacgactaaagcgcttgcaaagcacgcggagtgcgtcatgctcgccgtggaggacgcgaaaaagtacctcgaccgcaaagataactgcgtcttcaccggcaacccggtgcgcgtttccgttttgcaggccgagcgcgaagccgcccgcaaggcgctgaatctcgacgatcgcccgcttgtgctgtcgttcggcggcagcctcggcgcagcggcgctcaataaagccgcggcatacatgctcggtgaaagcgccaaagagaagaaatatcagcacatccacggctacggccagcacgatgaaaaattccttgatgaagtgcacgcagcgggtgtaaaggaagaagaaaatccgcagattcgcatgctcgagtacatagacaacatgccggagtgcctcgccgccgccgacctcgtcatcggtcgtgccggcgccatcaccttaacggagatcgaagccacgggcaagtgctccattctgattccgtccccgaacgttgccgaaaatcaccagttccataacgccatggcgctcgtgaaccgcgatgccgccgtgatgatcgaagaaaaagacctcaccggtgaaaagctgtgggaaacggtgaacaccatcctttccgagccgggccgcgccgaagagatcggcaaaaacgcgaaagccatggccgtgctggacgcaaatgaccgcatttacaacatcatctgcgaaaaagcaaaaaagtaaaccgtaaaacgcatttcaggcggacataccccaaaatttttccgctgcatactatgaccgtatccaaaggcgcgctttctgccgccttacagaatacggggtgtgtatatggaagaatatgaactggaacatacgggctgtgcccggcagaaagcagttttggtgcgcggcggcaatcgcctttgcggcgagctcactgtgcagggcgcgaaaaacagcacgctgccgctgcttgcggcggcactcctctgtgagggcgaaacggtgctgcacaactgccccgcactgtccgatgtgcacacggcagtcactattttgcggcggctcggatgccgctgtacccacacgggcgataccttaacggtctgcgcggacggcatgacccgctgcgatattccccacagcctcatgcgggagatgcgctcgtccatcgtatttttgggcgcgattctgtcccgctgcggcgaagcaagattgtcgttcccaggcgggtgcgagcttggcccaaggcccatcgatctgcatttggaggcgctgcgcaagctcggcgcagaaattcgcgaagagcacggctgcctgttgtgcactgcgcccggcgggttgcgcggcgggttcgtctcgcttgcgttcccaagcgtcggcgcaacggaaaacctgctgctcgccgctgcccgcgccaagggcacaacggtgctcacaaacgccgcgcgtgagccggagattgaggatctcgctgggtacttaaaccgctgcggcgcacacattcacggcgcgggcgaaagctgcatcgtcatcgaaggcgtgccgcacctttacggcagcacatacaccgtcatgccggaccgcatcgccgccgcaacatacatggccgcggccgccgtcacgggcggtacggtgcttctgcgtgatgtcaacagcgagcaccttttgccggttttgtcggcgtttgaaagcaccggctgtgccgtgatgcagtccggcagcgaattattattgcgcgcaccgcagagattaaaacccgtgcgtcacgtgcgcaccatgccgtaccccggtttccctacggatgctcaggcgcccgtcatgaccatggcggcggtgggggacggcaccagtatttttgtagagaacatttttgaaagccgctataagcatgccggtgagctcaaccggctcggcgcgaagatcaagttagagggcaaggtggctgtcatagagggcgtgccgcagctttccggtgcgccggtctcggcagaggatttgcgcggcggcgcggcgcttgtcatcgcaggccttgcggcgcagggcgaaacgcaggtgatgcacccgcagtacatcgaccgcggctatgcgcactttgaagagaatttaagggcgctcggcgcagacgtataccgaatatagagcgaaaagtaagagataaaacgtgaaaaacggaggctgaacatggcgcgtactccacgcagcgcagcggaaaagctcgcaatgagaaagaaaaaaagcagggcgctgctcctgttcaatataatcgcattcagcgtcgttgtcatcggcgcggtccttttgtgcatcttcgtgtttttcaaggtgggcaacgtcacattcacgtcagatgccggctacgatgaagccgatatccgccgcgtgtgcggcatcaacgacggcgataacctcgtgctgctggaaacggaaagccgcgaaaaagcgcttgagcaccgtttcccgtacattgaaagcgcaaagatcgtaaagcatatcccttccaccattgaaattgaaattacccccgccgaaacggcgttttccgtcgcgtgcgacgcgggttatctctatgtaagtgctttcggcaaggtgttggagatcgcttcacagccgtgcgagggcacgactgtggtgctcggggcaaatcccacgaacacaaagcccagcgaaacgatcacgttcggcgatgattccgtcaaagaagtctatgacgccatcgcggagcagatgacgaaaaacgagacgcagaacgtcacggagatcaacatgacgaacccctacgaccttacgctgacgtatgataaccgcatcacgttccgtttcggcaacatgaacggcatgtcctacaaaatggcgtttggcctcgagatgctgcgtcaaatggaaacgagcggcgagatcaccgaggagaccgtcggctccatcgatctttccgttgtgccggagaaaaataaggcgttttacgaggaagaccgcaccacagcctccgccacgcccgcacccggtgatgccgcaggtcgcacggacggcacagacagcaccgcaaacggcgacggggagaatggcgatactgccaatcccacgggtgataccgacggcatcacggaccccgcagcagacgacaacggtgacaacacgggcgacagcggtgacaacacaggcgacgccgaaaatgtgtaaaatttggaagcgtttccctgtttttcacaagtttttcgggtaatttgaacagccctggcaccatagatttcccgaaaaccgctgtaaagtaaaaatatttgcaaaggctcacttttttgccgctttcatcttgaattttggcgggaaaagtgataaattatagtgtatgaagctatgtaaagctgaaagactgtaaagaactgtaaaggtatggccctttatgggacgctatccggcggatttgatcgaagctcgagagaaaaccgttttgaatccggaggcggcgtgatgaatgaaaatcccggatccgtgcggatcgttaacggttaaagaccaaatcaaggaggaacataaaatgccgtttgaaattgataacatgcttgaagagaccccccagaccattaaggtcgttggtgtaggcggcggcggcggaaacgccgtaaaccgcatggcagatgccggcgtgcagcacgtcgagctcgtctgcatgaatacagaccgtcaggcactgtcccgctcgcaggccaagacccgcgtgcagatcggtgaaaagaatacacagggcagaggcgcaggctccaagccggaggttggcgcaaaggctgccgaggagagccgcgagctgatcgcagctaccctcaagggcgcagacatggtcttcgtcaccgccggtatgggcggcggcaccggcacgggtgcagcaccggtcgttgcagagattgcaaaggatatgggtgccctcaccgtcggcatcgtcacaaagccgttcgcttttgaaggcaagcgccgtatggatcaggcagaaaagggcattgcagagctgcgcaagcacgtcgattccctcgttgtcatcccgaacgaaagactgaagctcgtcagcgagcagcgcattacgcttgcaaacgcattcagcatcgccgatgacgttctccgtcagggcgtacagagcatttccgacctcatccagatcccgggtatcgtcaacctcgacttcgaggatgtcaagtccatcatgcaggatgcaggctacgcccacatgggcgtcggtcgtgcggcaggcaaggacaaggcagagcaggcagctgttgcagctatctccagtccgctgcttgagaccgctatcgcaggcgccaagggcgtcatcatcaacatcaagtcctctccggacatcgccctcgacgagatcgatgtcgcgtctcagctcatcaccgagcgcgcaagcgaggatgcaaacatcatttggggtgctgcattcgacgagacgatggaagacgagatgatggtcaccgttatcgcgaccggcttcgacggcatgaacggcgaaaagacccagaagcccgcagctccggctatcagcgacgcagacctctttggcaacccgtctgcgccgagcaccggcagtacaacttccgcgaagagcgacgatgataccttctccgacatcatgtccatcttcaacagaaagtaatttagaattacaatcaagcagggtatcggtctcgataccctgtctttataaaatgtacttttgggaggaaaacaaaatgagcttaatcaaaggcattcaccacgtggcactgcgtccgacgtatgcgcagtttgaaaaagcaaaaacgttctatcttgacctgctcggcctcaaggtcgtgcgccagtggggcgacgaaaaatacccctgcatgatgatctccaccggggacaacagctgcatcgaagtgctgcccgtcccggaagagaacgatgtgccgctggaaggcaagtttgcccatctcgcgctcgcaacagatgataccgacggttgtgtcgcccgtgtccgtgaagccggctacgagatcaccatcgaaccgaaagatgtagagctttccgacatcaccgcgcgcattgcgttctgcaccggcccctgcggcgaaatcgtcgagttctttgaccagaagtaagccgatttacaaaattaaatcacccaaaagcagagtttgaggggctttcctcaagctctgtttgcatatttggcgggttttcagccgctaaccaaaaggagattttcgttatgaccgatctcattttgcggatctttgtccgcgatcataaaaataccgaggatcctgccgtgcgcgacaaatgcggccgtgtggcgggtgccgtcggtatcgtcacaaattttctgctttttttaatgaagattatcgtcggcacggtttttcacagtgtttccgtcacggccgatgccgtcaacaacctcacagattccggctcgtccgttgtcacgctcatcggctttaaaatggcaagtaaaccggcggatgaaaagcacccgttcggccacgcgcgcatcgagtatctttcgggcgtcatcgtctcgttcatcgtcattttcctcgggcttcagctcggcatgtcgtccattgagaaaatcctcacgccggaggaaaacgccctcacgcccgtcgccctcgttgtgctcgtcatttccattctggcaaagctctggcagtgcctcttttaccgcaaggtcggccgcatgatcaaatccgagtccgtcgaagccacgtccaaggacagccgcaacgatgtcatcgccacaagcgtcgtgctgctcggcgccgtcatcaccatgctcaccagcgtgaatttggacggatacatgggcgcggcggttgcgctgttcatcgtgttctccggcgtgcagcttacaatcagcaccgcagatcctctcctcggccaagcgccggagggagagctcgtacagaccattaccgagaaaatgctctcgtaccccggcatcatcggcatgcatgaccttgctgtgcacaactacggcgtgggccgctgttttgcctctgcccattgtgaggtcgatgccaaaaacgacattctcgtcagccacgatctcatcgataacatcgagcgcgatttcagccgtgacctcggtatccacatggtcattcaccttgaccccgttattgtcggcgatgcccgcaccgatgcgctgcactgcaaagtgcagtcgctcgtcaccgcgctgtatcccaccgtcaccattcacgatttccgcgttatctggggcgttacgcacagtaatatcgtgttcgacgctgccgtgccgttcgcggtgaaggacagcgacgccgtcatcacccaaaagttagaggccgaaattcaaaagctcgatcccgattatcgcaccgttgtcaccatagatcgcagataagtaaagcacgccggttcccgaaattcatcggaaaggggcgtgctttttaatatttatatcaaattataaatatttatttcaacctgccaagcagcgttttgaggaaatcatacacgcggtcaaacgattttagattcatgtattcgtctgttgtgtggcagttttcgccgatgggcgcgaacatcacaatgtccagcccctccatgcgcggcagtaaagagcagcattcaagtccgcccgggcacgccgtctccatcatctcgtggccgtacacttctttcatcaggtcggccgtcatgcggcgcatgtaggagttcggctggtattcccaggagtcatagcgcaggctcgtctcaagcgtgaagccgcagagttcagccaagcgcttcacgcggccgagcacaccatttttaaagctgcggctcgccgcacggtcggacatcaccagttcaaatgcgccgccgtttaacgataccgtgcccacgttgttcgtcgccgtcatctcctcgcccgcggtccggattgccaccgtgttcgagggcatcaggtagatcaaatcgacaatcgcctgcgtatcggcatccgaaagcatctcgttcgccgccgtgtcgcggatttcaagcgtcaaattctgcttgccgtcctgcaattcgcggtcgatcttctcaagctcgccgtttaaaatcgccttcactgcgtccggctcgtcgcagaagatcaccgttttcgtctccaccggcgcatagttttccgcttcgccgcccgccatggtggaaagtcggtatgccgcgccgttttcggaaagcgcattaagcaaacgcgccgtgatcttaatcgcattgaactgctccgggtgcaccattgcgccggagtgtaccggctgcacgccggaaaccgtcagcatgagggccgcgccctttgcagactccgtctcgcacgttttcgtaagcttcatcaggtcgctcgtaaagcaggaaacgcagcttgtgtattccaccgtctcgcccatcacgtcaaggccgatcattcttctggatttcagcttgctcgcgtccagcacgtccacgccgttgcagccgttttcctcctgcaccgtaaagacgagctccagcggcgggtgggggaaatcctcctccatcacggccagcatgtacgccacgccgtaaccgtcgtctgcgccgagcgttgtgtccttcgcgcggatgtcgcccttgtcgtccacataaatctcaagggggtcatgcgaaaagtcatgcgtgttctcgggtgttttcacgcacaccatatccatgtgaccctccagcatcacgacaggcgcgtcttcgtaccctttagaagccggtttgcgcacgatgacattccctaatttgtcctgctcgtagtttaaaccgagcttttccgcaacggagcacacgtagtcgcttacggctttttcttcggttgaggggtgcggaatgccgcagatcgcctcaaaatatttctggttcggctttaattggtcgagtacgaatgccatgttaaacgtcctttccgcgctcacgcctccgaagaggagatgaggtatttgaaaatctgcagcttgttttcttcgtacagcccaagctgctcgtataattccttgtagtagctgaaaagcgccgtgcgcgccgtaatcgccgtgcgcaccttcgtcagatgcaccgcgctgccggggttgtcgtagtagttgtagattggcgcggtcagcgcaaaaaaccgttctgcatagcgtatgtacgtcaaattaaaatacaggtcttcgctccacgtcatttcctcgctgcaccgcacgtccgtgtgtgcgcgcaccaaatcggcgcggtaaagcttgttccacatcacgccgtagtaaaagctcgccggctcctgcatcagcccgcaggcgaattcctcctttgtcataaagcccatcggcagaaaaccgaatgtctggaattttgccaaccgctccgtcagctgcttctttttattcggcaaaagcgggtcaagcttcgcttcctttttcggcttgtacggcacaatgcggttatacgccgcaatgacgagatcagcgttgttatcttccgcacgttgaacgaggagctctgtcgcaaacggctccagtgtgtcgtccgcgtccacaaactgcaaatatttgccccgcgccatgcgcatgccgaggttccgcgtcgccgaaacgccggagttttccttatcaatcaaaacgatgcgcgcgtctgccttcgagagcatctcgcacaccgggtagctcacgtccttagagccgtcgttcaaaagcaatatttcaagatttccatatgtctgccgccgaatgctctccacgcagcgcacaatgttgttctgcgcgttgtagatcggcacgatcacgctgacaagcggtttctgcatcaaaatacttcctttcctgcatcatgctccgtttttccctattttaccgcagaaagttccggaagaaaagactttttgaacattctgcttgcaaatccggtaaacacaccaaattgaccggtgcaaaattagccaaaacgcatattgacttaaagcaaacttttaatgttatgatatgttatagaaatgtatgcggagccacacccgcacataacgaattcttaggaggagttttcgtgaaacccaaggtttatttcacaaaaacggtcacccctgaaaaggtcattgaaatgtataagcagctcgattgcaagctgcccggcaacgtcgccgttaaggtacattccggcgagttcggcaacaaaaacttcctgcgccacccgattgacgaaccaacctgaatatagtagaatacaggtaaagaacaacatttggaggattgggatatgaacaaaagtcaaatggcaaagcttgcggcagcggccggtgtgaacggccttatgtatgacccgaatgcagagggcgttttcggcaatgtgcaggggtataccgtcaccattatgccgaacgccaacaaccgcgtctactatatgctttcgctttcggtctcgcgcatgggcatggcgccgaatcccgcagatttcaaaccgcttgagaaaatgaacaaggttttgagcggctgtaccgtgcagcgtttccgcgtcaatttccttgtgaagctctccggcaataaagataaaatggcagaggccctgcacagtgcgcttgatacgctcatcacgttcctcagaacaaacgggtatacaaattgctgcgagcattgcggtcgcccggagggcatagacgcctacaccgtctccggcaacgcgtaccttttgtgtgaaccgtgcttcgggcaggtcagcgaagccgccgcgcagcagaaccagacaaaaatgcagaagcaggagcaggttttgcccggcatcgtaggtgcgctcatcggttcgctgatcggcgccgtcgtcatcgtcattgtcggtcagctcggctacgtcgccgccgtttccggccttgtcatggccatctgcacgttaaagggctacgaaatgctcggcaaaaagctcggcacaccgggcatcatcatttcctgcgttttgatgctcctgatgatcttccttgcgtatcaggccgattggtcaatcaccgcggcgcagttctatgagaccgatttcttcaccgcgttccgcgccatgatggatctcatcaaagaaggctatgtcgattccggcgattacttcggcggccttgcacaggtctatctcttcgccgtcatcggtgccgtgcctaccgtcatcgccatggcaaagggcgcaaagcacatggtcaccaccgccaaaatgcgcagcgcctacgcacccgtttcggcacctgcagcggcttccgtgcagatgcccgtgcagcccgcttcttcgcctactgctccgcagaacgtcgaaaaagacatcgaaaagtaaaattcaaaaaccatcgcccgcaggcaaccgtttttcgtgcctgcgggcgattttttacgtctttttgttctgatttttgagcttttcggcctctgcctgcgctttttttaactgctcctgcgcaagcttggcgcgcttcattgcgtcttccattttctgtgcggcacgcgccgctcgcttttgggcttcctccacgcgctgccgcgcttcttcggcttccttttgcgcctcctccgccaaacgcacatcatcgtctgcatcgggattttgcacggtgtcctgtacgggttcaggcgcaagcttaatactccagctcaaaaattctggcgcagatgggggcggggagatctaccgtcagcgtgctcttctccgggttccatgcgcatttcgtgttgtggtttgcggggtatgcgcagcgcacatttacgtgctcgttgccgcgcaggaagtccacgggcagcgtgcagcggccgtccggcgcgccgcgtctccacacggtgatgtacgctttgtgcgcggttttaaggcccagcgagacccacgtgtccgcaaagtgcgacgtaccgagcggccagaacggcagcgcgcgcttgatgtcgccgcggattgttttgtaataatcgagcgcttccttgacgagcgtgaagtcctcctcaggaatttccgccaaatgaccgctctggtggatgcgctgcatcagtgcattgcacatattaaatacggcttcctcgcgtccgccgcccttcatcgggtagctccaaatggcgctctgctccggcgtcagacccgagggcgcgttcgccgcaatggacgcatagcgcaggtagtcctcctggtcgctcgtagactgaatgctgtggcgcgagagcatcgcgtagtcgatgcgcatgccgcccgaggaacagttttcaattacaaggtcggggtagcgggcaaagacggaatcgagccaagcaagatatgcgcgctcgtgcccgagtaaaccgtcgcccacactgtcggcgtttaattccgtgccgatgcccggctcaatgttgtaatccatcttgatgtagcccacgtggtagtcgcgcacaaggcggtcaacgacctcatttgcgtgctccacgacctccgggttgcggaaatcgagctgccagcggctgcggtcgtgcacctttttgccgtggcgtgtgaagaaccagtccgggtgcacgcgcgcggccttcgggcagcaaatgcccattacttcaatttcgagccacacgcccgggatcatgcccttcgagcggatgtagtccatcacttcctcaaggccgttcgggaaacgttccttactcggcagccattcgcccacgttgtcccaccagaagccgtccgcgtaccagcctgcgtccacgcagaagtattcgcagcccgccttgtgcgccgcgtcgatgagcggcagctctttcgccgtcgtcgggttgccccacaggcagttcatgtagtcgttgaaaatgacgcacagcttctcgttgtctgcatttttgcggcgaatcatgcggcggtacttcgtcagctcgcccatggcgtcatcaaatttgccgagcgtggagcctacgcacaccggcactgttgtgaatgtttcgcccggctgcaaattcttccaccagtgcgattccgtttccgtcgggccgcttaactgaatgtagaagttacccatctggtcgctgatctcccagtgccacgagccgttgtgctcgatctgccagaataaattggagcccgtttccgtgttttcaagcagacccatcggcaggtattcctttgtggaccaattgccgatgttcgtcgcaccaatcaccttagaggagcgctgaatttcctcgggctggcagcgggcgagaccgagctgcgggaaggtgtagctttcccactgcatttcgcgctgccagccgttgtgcgggtaccagacgcgcattttgtcgtcggtcgaaagcataccctctttttcgatgccggtgagggcaaaggaagaaacgtattccagcccctgcggctctgtgccgacatttttcacgtccgtccagcagcgtacagcctgaacgccgttataaaactgcatgtgcgaaatcgtttcaatgccgcagatcttatcttccatgtggatttccagcttgcggccgaactcgttgtgcttgtccgcaaaatagacgagcttcatgcggtcgccggggcttgtggaaatgtatttgttgccgtggcgctcgcccggtcggttttgcccggaaatcataatttccaagagattgtatcgctcggtgttcaggcgcaagccgcccgtttcgcggtcgtgcacgtgcagcagactgcgctcatcaaaggggagcgcagagaagtgcagcagcttgcagccgaaatcttccgtcttttcaaaaacgagatgcagcccgttttcgtcaatttgaatcaaatccatagtataagcctttccgcagataaatctgctgtgatctatgctgagttgtctgtacaaatagtagcacaatcggagagacttttcaaggggattatcggtcgcggctttgctccgcatgcatgccgagcgcggaatactgcaaagcgtgcgaaagtcgtgccgaagccttttgcaggtgcttgcacaccgtgccgcgcgtcaggtgaagctcgtccgcaatctcctgcattgtcagccgctcgccgtagtaaagctgcacgcagtcgcgctggcggtcggtcagctcattgccgatggcgcgccgcagcaaaacctgcgcttctaaaagctcatttttgtttgtctctgcaccgatgcggctgagtagcttcgcctgccgtgcaccggcggaaaggggcttatatccgctcacgaaaccgccctccttccgcgcttttgcagcgcatgacctgttacaagacactccaaatacatggtgtaaagcatctgcacacgctgggcctgctcgcctgcaatgtcatagtcgcgttcggcgcggatgacgagcagccgccgtttaatgcgctccgcctcatccaaatactcctgtccccaggaaatgtaatcgttcacttgcagtcacgatcctttcgtttcaaaatagaacatgtgttcgtcgactctcatcataaacaaaaatttccgaaatgtcaatcgaacgcggaacaaatgttcaaaagatgtcctacgatgtcctataatgtcctgcgatgtccgcttttctgcatatttatatggaattatttacattttggggctgttattttgcgcttttttgatatataataaaggtgtatttaaacttgaaatgactgaacgctttggcgttttgaccgaaaggagttttaccatgaactttttgaagaatatctcggccgcatttaagaccgccggcggcgccgtacagggcgctgtgaaagtggtagaggaaaagaaccgccgcactgcgctcatgaatcgcctgcgcaccgttatccgctgtgaggaaaaggcagaggagcgcgcctatctcgctctcggccgctactactaccacaacctgcgcgatgcagagaacaccgttacggagccgtactgcatcgacattgaagccgcccagaagcgcatcgatgccgctgtggagaagctggaagccctgacccgtgagggtgacagcgaagcggaagaagaggagatcacccttgatgacgtgcaggagtacactcccacgccggaagaggaaaaggaagccgaagaagccgcatttgtgccggacggtaccgtagacgaagccgtggaagcggcagagcctgccgccgagcagccggaaacgactgagcccgaaaaagacgaaagcgaagaagttccctacgaataatcgctttaaaatgaatgttaaaaggcggacctacagtccgcttgattccttgcgcggaaaaacgcccaccttttgcgccggggcaggttccgtttgcagaaagtgagtgaatttgatgtctacgaagatacagaaagatattgtctgccccgcctgtggccagacgcagaaattagagatgtacacaagcgtcaatgcggaggaaaaccccgagctgcgccgcgacattctgcgcgaatccatgtttgattgggaatgcctccactgcggctacaccgcgcagatggcgtatcccatgatctaccatgacccgatgaacgcgtttatgatctgtctgcgcccctccggcgcggtatccggcgcggagcctatccccgccgtgcgtgcgctgaaaaagcgcagcgtgaaaaacccgcaggagttaaaggagaaaatcctcattttcgaggccggcctcgatgatgccgccgtggagcttgtgaaaaacgccatcgtcaccgtggtgcgcaaaaatctggacggcaatgtgcacgcctatttctgcgccgcaacggaggaggaactgcgtttcgcactgttcgtcaagggtcgtcaggagcccgtgtatcagaccaccaaaatggccgtgtaccgccagtcgcaggaggttttgcgcacgctcgattacaaatccccggacgatttcgccgtcgtcaactccaagctcgcccaaagccttttggacgaatataagtcgatctaacccaataaaagcaaacggcaccgcgtttttgtaacggtgccgtttttctatgcgcgcatgtgcacaggctttgcgttttgtggggttacgggtaaacgacctcggcgcgtgtcacttcgccggtgccaaaattaccgtaatgcagtgtgaaatataacgtttcaccgtttgaagcgtcctgcacttcatcgatgagcaaaagcgcttcgctttgtgtgtctttcggctgcaagcggtaggagacgacgttcagtttctctccgagtgcagtctcgcccgttgcgtgcgaaatctcacaaatgttgtagtgctccgtaatatatgccgcggaaaagccggttttcagcttctctgcggggtgcagcctgatgtgtggcacggttttcgtcagcgccgcgaccatctgctctgtaacgccggtttggatgttctccgccgggtgcagcgcaggcaggctttctgccgaaacggaaatcgccaagataaatgtcaagatgagcgtaatgcaagggataatgagctttttcatgggttcctccttccataacgaaaaagtgcaaagcctgtgttatggcttgagtataacagagcaaattcgatatgtcaataattttatattaaattattttaataatgtgctttacaaattaaattttctgtggtaggataaaatcacggaatttatgcaaaggggaggaatgacaatggcgaataacgacagcaccaagcgcgtgccgctggagcttttgtgcatgctcattttaaaggagggcgaccgctacggctacgagatggtgcaggagatcgaatcgcgcagcgggggacttttgtcgttcaacttggcctcggtgtacgtcgcactgcggcggttggaggagcgcgggtgtgtatcttcccgcaccgaaatgacggacgccgcccgcgcccgcatgcgcgtttactatcatttggagcctacggcggaagcgtatctcacggagcagaaagaggaataccggcgcacggccgtaggtgtgcagaacgtgctgaaaagctgcgaggtgcaacatgaaaaggaagcctgaaagcgggtttgagcagtatttgcgccgcgtgtatcgggcggtaagcggcacgcgcgcagagaagaagcgtgagaccgcccgcgtgcaaagccttttgtgcgagattccccacgcagaaacgatgtcgtatgacattctttgtgcggccgtcggtacaccggagagctttgctgcgggatttcaaagccgccgaacccaaagtccgctcgtgctttcggcagttatgctgaccgtgctcgcgctcgcgttcatactcggcgccgcaatgggacaagcgcgcgaaaagacgcagaccggcggtgttgtgatgagctatcgctacgaagacggcagcttgcagaagcttttggaggaaaggccggagctgctggggtgaaagttttgtaaaaaagactccctctgacagagggagtcttttaggttatgcgtgaaaatcgatgcgatgctcaattaaacattgcgcggattgaattctggtgctgctcggtattgacggccatttcgttgacggcgaaaagcacgtccgtgatgccgtgctccgtgcagtaggtcggcaggtcgccttcaaagtagcggaagtccgccacgtgtacctcgtcaaagcttgcgccaaggaacggacccatggcgttgccgtaggagtccttcaccacaagcagcttgcggcccgtggaaaggtcgtggttcgtgatgcgcacgcagcccatatcgccgtgcaggtacatggcgtagccgaggctctcgtcgtggctattgaggctgtcggtttcctcaaaatactgcccgtcatacgaaatttcgcatgtgtagttgtacttcgggtcgtagagatcgagtgtatcggggttgttgttcagcacgtcttcgctcgtaacgtaggcaaggtagcccgtgaagtcagaggacgttttcgtgaagctgtcgagcgtcgtgggcgttacacctgccgcttcgcagaacttttcatacgcgtaaaacgcgccgagcggcgcccagtgggtatcggtatcaaaataaatgtcttcgttgttgtgcaggttcagcgcatcgtaaatatccaccgcggtgatgcttgcggaaagcgtattgttaaccgccatggtgttctcacgctgggaagcttcctcatagtaattgcgcacgcgctccggcacgccgaattccgagtgattcgggatgaccatgctgtacacctttgtgccggaaagctggcttgcacagtcattcagcgtttcggcgtaggcggtcgccatgctgtcgctgccgtagaacatttcaaagcccttgttattgtagatgagaatgcccgaggacatgtggccctccgtgccgtcgtcatagatcggcggcggtgtcggctccggcgtggcggtcggctctgcggtgggagtaggtgtcggctctgcagttgcggcggcttccggtgtgggctccggcgtaggtgtggcggcagcgggtaagaacttgccgaacgcaccgaggctgtacgcaatgtaccccaaaatgccgatggccaaaacgatcatcacgatgacgatgggcacgacgggcgagtgctttcggcgcggcttctcgtcgtagccttcctcatattcttcatactcttcgtagtcgtcttcgtcctcatacggctccggccgtggagcgggtgcaggcgcggggcgctccgagcggggcgcttcctgttgcggcgctgccggtgcgggatattcgcgtgtttcttcaaagccctcgggaccgtttttcggcgacttcggggtaaaatgcagattttctatggaggaggggacgcgcttttcgttttgtgacgattgctttgcgtacagcgtttccggcgtcagctcggaagccgcgctgcgcgggtcagcctttgcggcgcggcgcgctctgtcttcggcagaatacgggcgctggtttttgccggccatgtgctttgccattggatccatcctttctgtaaaaagggtcgtttattttctcaagaaaaaagccgcgcggaaacagaccgctgcggcttttcgatttccatgtccattatactggcttagaaagaaattgtcaattcccgtatgctcagtgtgcgaccggcaaataccccactttcttcatgaccttttgcaaagtacggcgtgcaatggcctctgcacgcggcgcggcctcgctgtagcacttttcaaggtatgccttgtccttgataagctcgttatagcgcgcctgaatgggctcaagctctttgacgacggcttcgcccacggcggtcttgaaatcaccgtagccgcggccctcgaattccttttcgatttcgtcatagtttttgcccgtaatgcagctgtaaatgcccatcaggttattgatgccggctttgttttcgccgtagtagacgcgggcttcactgtccgtgacagcgcgtttgaactttttcatgatctccgccggggtatcgagcatagtgataaagcccgccgtgttttcatcggatttgctcatcttcttcgtcgggtcctgcaaagacatgatgcgcgcaccggtcttcgggataagaccatccggcacgacgaatgtcggggagtaaagcccgttaaagcgctccgcaatgttgcggcaaagctcaaggtgctgcttctggtcggcaccgaccggcacgtaatcggcgttatacagcagaatatccgccgccatcaggcttgggtaagtgaacagccccgcgtttacgttatcggcgtgctttgcggatttatccttaaactgcgtcatgcgggagagctcgccgaactgggtgtagcaactcaatacccatgcaagctgtgcgtgctccggcacctgactctggatgaagaaaatgctcttttccgggtcgatgccgagcgcgagcatcatcgcgtaggcggaaagcgtgtttttgcggaattccgccgggttttggcgcacggtgatggcgtgcaggtcggcaagcgcgtacacgcactcatagtcgttctgcagcgcgacgaagttcttcagcgcaccgaggtagttgccgagcgtgaacatgcccgtcggctgaatcatgctcaaaacgcgcttcttttttgtttcgggtgtggtgtttacggtattttccatggtgattttcctctctgatatcctttatttttccaccatctcgcggatggtctcgccaagcagcgtgatgccctttgtgagctgctcatcggtcggggtggagaaattgatgcggaacgcgtcgcacggctcgttttcatccgtcaaaaatgcggtgcccggcacaacgcaaaccttcttttcgagcgctttctgtacgaattccatcatgtcaacgcccttcggcaggtggcaccacgcgaacagaccgccgttgaacgggtcccacgtgatgtacggcgcaaggtgcttttccatgaggtcaaggagcaaagcgcgctttttcgtgtagatttttctaagccccgcaaggtgcgcgtcaaagtcatattccgtcatgaagcggtagcacaaaacctgcgaccagatattcgtgtgcacgtcctgcccctgcttgcagacggtcattttggcgagaaccggctttgggccgacggcgtagcccacgcgcataccgggggagatgaccttagagaacgaaccggcgtagaggacgatgccgtccgtatcaaacgacttgatgctcggcagcggctcgccttcatagtaaaggtcgccgtaggggttgtcttccagaatcattacgtcgtgcgctttggcaagctcatacaggcggtgacgcttttcaaggctcatcgtgatgccggaggggttttgaaagtttggaatcgtatagatgaacttcacgttcttttcggtctcgagcgccttttccagcgcttccatgttcatgccgtccgtatccatcgggatgccgacgagctttgctttgtaggaacggaagtcgtttaaagagccgatgaagctcggcgcttcacaaataacggtttcgccttcgtttaagatggattttgtgaacagatccatgatctgctgtgcgccgcttgtgacgagcacgccgtcatcctcggtaccgatgttgcgggaggacttcatgtacgccttaagatgctgtaaaagcggcgggtagccctccgttgtgctgtactggagcgccaaaatcggctcttcttccatcagctttgcggaaatggcggcaagctgtttagacgggaacgcttccggcgcagggttgccggcggaaagcgaaatatagcttggatcagcggcgtatttaaagatttcacggattgccgagggctttaacgtgagcacgcggtctgaaaatttgtattccatcgtaacgtcacctttctatatgattcatttgattttgcactttcaggcttttacgggtgtatctgaaaacaaaggaaacgcaggatatttcgcaaagacgaggcgggttcaaggcgaaaatcgcaggaagccttccggctgccgagaattttcaacgcagaaaccgtccgtatttgtggaatagacaagtttttgacttttcagatgcaccccaaaaagtaaaacctcttgcgcccttaaaacaagggacaagaggtcaaattcctgcggtaccacccaaattggcgcataaacgcccgctttacagccgtagttacggcttggcttctaacgcggccaaacgtcgggcgattttcccgcccgccctcatggagccattcgccgcgcagcccgcaccccgtctcaccgaaaggggctctctttgccgttttgcatcgggtactatttccaatcatcggttttgatattaccgctattctaagcccttttttgcggtttgtcaagtcggcacagccggaaaactgtaaatttccacgtgggatgcaagagaaaccgacaaggaaaaagcgcatgaaaggcgcggcgacagaaaccttgtgcttttcacaaaacaatcctaaaacccgcctgcctgtttcgtgttttcctgcgggcaaggcttcgtataatggtagcacagaaaagacaaagtgcaggaaagggcggaaaagacaatggaggaaaaagcagttttaagagtgcgggaccgcataagcgcggcccttaccgtgccgtatgtgcgcagggcggtgtggctgatggcgggcggccttgcgggctttttaacggcgcgcgggctcgtcttcggcaaatacgcgccgtttgcggcggcaggcgcggcggcagcgccgttttcgaccatgtgggcggtcatcctcggcggcgcggtgggctacctgttcccgtcgcccgtggatatccccgcgcgctacatcgcggctttgctcgccgtgggggccatccgctggtcgctgtcggagttaaagtccatccgcgaccacccggtcttcgcaccggtcacggcatttttgccgctgctttcgacgggcatcgccatggtgtttttaaacggctcgctttcaaatgtgctcgccatgtacattgcggagtcgtttttggcggcgggcacggcgtattttctgcgccgcaccgtgcagcttttggagacccaccgcgagaccgccgtgtttgacagcggtgacgtggcggctgttatcgtctcgctcggtgttttgctgctctcgttttcaaacgtgaccgtctcgcacatttccgtcgggcgcgtgctcatcgtgctgacggtactcgtctgcgcgcgcatcggcgggcttgcgggcggcgcggtggcgggtattgcggcgggcacggtgcaggggctctccacggcggggctttcgtatctctccggcgcgtacggcctcggcgggctgatggccggcgtgttctcgccactcggcaaattcgccgtggcggtggcgttcgtcatttcaaacggcatcgcatccttgcaggtgaacagcacttcgcaggtgttttacggcgcggtggaggtggccgcggcttccattttatacatgattttgccgcagagccgacggctttccaatttattcaccgcgcacggggacaggctgccgggcgattctcttagaaaaaacgttattttgcgcctgcggtatacggcggaagccatgcgcagcgcatcggattccgtagatcgcatctcggaaaagctggagacgaccgcggcggctgacctgccgcatgtgtacggccgcgcggcggagaaggtttgcaccgggtgcagccagtgcgcagtgtgctggcgcaaaaatcgcgacgagacgcaaaaaacgttctcgcggctttcgtatccgctgcgggagcgcggcaaaatcgaacgcagcgactttgatgtgccgtttttgacgcgctgcaaccgtgccatggagctgagagacgccgtaaacggcgaataccgcgagcttttggcaaaagaaagcgcccgtatgcgcgccgaacaggtgcgcgccatcgtcgaagaacatttccgctccacggcgcagatgctcggcgacatggcggaggaattcgagcagtaccagcgctttgatgaggacagtgcagagcaggtgcgcgaggttttgcgccaccgcgagctcacgccgattgaagtctgctgccgcattgataaattcggccgcatgacgattgaagcaaacatttgccgcacacatggggtgcacatcaacaaagggcagctgacacgcgagatctccggcgcgtgcgggcgtacgttcacgcagccgagcgtgacggcggcgggcgataccttaaagctgcaaatgtgccagaagcccgtttatgccgtgcagcgcggctttgcgcagcacgcagcaaacggcgcgtctctctgcggcgattgcgccgaggcgttcacggacggcagcgggcggtatatctcggttttaagcgacggcatgggcacgggcggccgggcagctgtggacggcacaatgaccgcggggatggcgcagtcgcttctcaaagccggtatcggatttgagagcacactgaagatgatcaactccgccatgctcgcaaagggcggggaggagtcgcttgcaacgctggatgttgcgtgcatcgacctctttacggggcacgtctccctgcgcaaggcgggtgctgcgggcacggtgctgcgcaggcgcaagaagacggagtatctggaagccaaaagcgtgcccgtgggcattctgccggaaatcgcctttgcccgcagcgaaaaagacctcgatgcgggcgatatgctcgtcatggtctcggacggcgtgacggcttccggcacggagtggctgtgcgacctcattgcaaactacgaggacgacgacccgcaggcgctttccgagcgcattgtggagcgcgccgtaaaagaccgcgcagacgggcacgaggacgacgtaagcgccgtggtgctccttatcgaatgacgtacaattcaaaagttctccctgaaatctatgtaagattaccattgaatagctcagtatagtatggtgtacttatacaagtttatgagatatagcatctcaatatttgagcaatttatgcaaaagaagggagaaacccatgaataaaagagcaagcggtgtacggatgcacgtttcctccctgcccggcgtgccgaacggcaactgggcgttccgcgtcacgcaggagcagctcggcggcatcgacaaagagtggctcaaagaattaaacgacgtctattacagaagcaaataacagcaaaaggccggcgggtttccgtcggcttttgtcttgcaaatttccgatgtgctgatataatgggaaagagaaaaatctcttagagaaaagttccttttgggaggaaaatagtatgatcgatatgaaaaaagcattgcagaacattgacgacgtgatcgaaaaggggccgtacaaagacacatgggcgtccctttcaagctggcagacgccgaagtggtatcaaaaggcgaagttcggcattttcatccactggggcgtgtacagcgtgccggcgtttgacagcgaatggtatccgcgtaacatgtacatagagggctccaaggtctacgagcaccatatcaaaacctacggtgcacacaaggatttcggctacaaagatttcattccgatgtttaaggcggaaaagtttgatccgaacgcatgggctgcgctttttaaaaaggcgggcgcaaaatacgttgtgccggtggcggagcaccatgacggtttccagatgtaccgctcaaatatttcgcactggaacgcttacgagatgggaccgaagcgcgatatagtcggcgagctgaaagcggccgtggaagcgcaaggcatgacgcttggggtatcctcgcaccgcattgagcactggttctttatgagcaacggcaaaaagtttgagagcgatatgccgcaaaacccggaccgcgacgacctctattggccctccatgcccgacccggagaatttcgatgccatcgacggcaagccctctgaagaattcatggaagactggcttgtgcgcacgtgcgaactcatcgacaattatcacccgaaaattctctattttgactggtggattcagcaggaggcggcaaagccgtacctaaaaaaagcggcggcgtactactataatcgcgctgcggaatggggcgaggaggttgccatcgattataaattcgacgcgtacatgttcggcacggcggtgccggatattgagcgcgggcaaatggcggacatcaagccgtatttctggcagaccgataccgccattgcgctgaattcctggtgctacacggaaaacaacgacttccgcccggcgggggacatcatctgcgaccttgtggacatcgtcagcaaaaacggtgcgctgcttttaaacgtaggcccgaaagcggacggcaccatctccgatgaggacaccgcggtgctgactgccatcggcgactggatgcaggtgaacggcgaagcaatttatgacacgcacgtgtggaggacgttcggcgaaggccccacaaaggtgcaggacggcggcttctccgacggcgtgaaaaagaactttacgggcgaggatttccgctttacggcaaagggagatacgctctttgccattgcactgaaggcgaacgacaacggcgaataccacattcactccctgcgtatgcaggagcacaccgccggtacggtgtaccacggtttagtcgagagcgtttcggtgctcggcacagacgatgcacccgcgtggacgcgcgacgaaaacgggctgcatatcaagacgaactacacgtccgataagccgatcacattcaagattaaattaaactaaaatcacaaaacaaaaagcagagtgttcggatcgagcactctgctttcgttattttatgcagttattcggagatatactcgcgtacgcggaacttggcgccggcgttttcgcacagcttgcggcaggcttcaatgtcctctgcgggcatggtgctgacgaccgtcatcaccacatgcggcacgttttttacggcttctgccgtaaaatgcagcatggcatcgaacgcctcggggccgtatttcgagtgacataccgcatcgtacttttcggcggtcggcgcgtttaagctgatggacacaatgtccaaaagcccgtgcatttccggcgcggcgttgcgcccggtgatgcaatctgcaaggccgttcgtgttgacgcgcagggtgtaattgcccatttcttttaagcgcgcggcaagccaaagcatgtcgtcccagcggcaggcaggctcgccgtagccgcagaagacgatctctgcatatgaattcaggtcgcgttttttaaggtcggctaagatttcctcttttgtcggctccgcgccctcgtaccagaggttatccgcatacaggctgcccgtgctgttgttgcgcaggcagaagtcgcacgcgttcgggcactggttcgtgacgttgatgtagaggttatcgccgtattcatacgtgatggtcaagatgatcgctccttttattttgcggcgctcggcagcgtgataccgaaaaggcggcaggcgttttcgcaggcggtctccaaaacctcctgcgccgtgatgccgcgcacttcggcgatcttcgccgcgtcgtaggggatcatggagctgtcgcagcgcttgccgcggaatggcacgggcgccatgtagggcgcgtccgtttcggtcaaaaggcggtcgagcgggatggcctttgccacctccacgctgtggcgcgcgtttttaaacgtcacaacaccgccaaggccgatgtacatgccgagctttacggtctcctgtgctaattccgcactgccggaaaagcagtgcacgacgcccttcggcttgtatttccgcagaatgtccatcatatcgccgtgggcctcgcggtcgtggatgacaacgggcaggtcgtgctttttcgcgagctccagctgggcgataagcacctctttctgcttttcgcgcgggcactcgtcctcccagtggtagtcgaggccgatctcgccgacggcgacgatcttcgggtgggaaagcagcgcttccacgtccgaaagccagttatcgggcaggtcgtttgcgcactccgggtggatgccgactgcaccgtagatataatcgtatttttcacagagcgccacggtttttttgaggctttcataatcggctgccatattgatgaccgcaacgacgcccttttgcggcagtacggagccgagcagctcgtcacggtcgatgtcgaactgctcgctgtcgtaatgtgcgtgggaatcaaatatcatagagattttccttagcgaattttggagcctgccggggtgccgtccacaaatacgacgcgcacatcgtcctcgcctgcgtctgccgcaaggatcatgccctggctttccacgccgcagagcacggcgggcttcaggttcgcgacgacgatgacggtgtgaccgatgaggtcttccggcttataccacttcgcgatgccggacgcgaccgtgcggggtgtggaggtgccgtcgtcgagcgtgagcttcaagagcttctttgcacgcttgatcggctcgcaggcaacgacctttgcggcgcgcagctcaacctttgcaaagtcttcaatattgatctgggcaagaccctcaatttccttcttcggctcttccttcggagcgtacttcgcttccacagcggcaatcttctcgtccatctccttcggatcgatacgggcgaagagaatctccggcttgtctgttactttacccccattcgggtaaacgccgaacgtatcgagcgtatcgtatgcgcgcaaggtcgtgccgagctgtgcgacgatcttctctgcggtgtccggcataaacggtgtgaggagcgccgcgccgatcgtgatgctttccacaagattatagagaacggtggaaagtctgtcggctttcgcttcgtcctttgcaagcgcccacggcatcgtttcgtcaatgtacttattgcagcgcttgaagagcgtgaagatttcggaaatggcatctgccacgcgcagttgatccatcttcgtctgcacgctgttctttgtggcgagcacaacgctctttaaatcgttatcgacatcttctacgacgtttttgttctctacaacgccgccgaagtacttgtttgtcatggaaatggtgcggtttacaaggttgccgagcgtgtttgcaaggtcggagttcgtgcgttcgatcatcagatcccacgtgatggtgccgtcggattcaaacggcatctcgtgcaggacgaaatagcgcaccgcgtctacgccgaagaggtctacaaggtcttctgcgtaaatgacgttgcccttcgatttgctcattttgccgccgttcatcagaagccacgggtgaccgaacacctgcttcggcagcggcaggtcgagcgccatgaggaaaatcggccagtagatggtgtggaagcggatgatgtccttgccgatgaggtgcaggtctgccggccaatcacgcttgaactgctcggtggagttgccgtcgcagtcgtaaccgatgccggtgatgtagtttgtgagcgcgtcgagccaaacatatacgacgtgcttgtcgtcaaaatcgaccggaatgccccacttgaaggaagttctggaaacgcagagatcctgcaggccgggcaggaggaagttgttcatcatttccgttttgcgctgcggcggctgaatgaactccgggtgcttattgatatagtcgatgaggcggtctgcatacttgctcatcttgaagaagtatgcctcttccttcgcgggcttgacctcgccgccgcagtccgggcacttgccgtcgacaagctgggactcggtgaagaaggactcacacggcgtgcagtacatgccctcgtagtggcccttataaatatcgccctgctcgtagagctttttaaagatcttttgtacctgcttttcgtggtaatcgtccgtggtgcggatgaatttatcgtaggaggtgttcatcacgtcccagttcgccttgacaatcttcgcgacgttgtcgacatattccttcggggtgatgccggcggcattggccttttcttcaatcttctggccgtgctcgtccgtgccggtctggaagtagacatcgtagccctccatgcgcttatagcgcgcaatgctgtcggcgagcacgatctcatacgtgttgccgatgtgcgggcggctggaggtgtaggcgatagccgtcgaaatataatacttcggtttactcatgggtggatcattcctttacaatgtattttcaagaggattgattttttcaacggttgaatgtattcaactgaatagtacggcggaaagtgccgagaggatcatcagcccggccaaaatcgccgcgccgatgcgaacgatgagcttgcgttgcttttcggttttcatagaaagctcctttcgcgggtgcagggcatgcctgtacgtgtaccctttattttaccattctttttttcacctgtaaaccgctaattgactttattttccgccgcggttacaataaaagcggaaatacttttgaaatgagggaaaaacccgatgcagtttttaaatacggaagacaaaccgcgccgcgcggcggtcatcaacgatctttccggtgcggggaaatgctcgcttacggtgatgctgccggtgctgtccgccttggggtgcgagacatccgtgctgccgacggcggtgctttccacacacggcggctttaaagatcccgtgtaccgcgatttgacggatgatatgctgaaaacggcacagcactggaagcgcgagggggccgagtttgagggcatctgctccggatacctcagcagccgcgagcagattgacactgtgcgggaaatcttcgagctgtttacggacgaacacagccgtccgctgcgccttgtagaccccgtgatgggcgacaacggcacgctgtacggcatttttaataaagaaacggcgcagagcatgacgaggctttgcgaaaaagcggacattttaacgccgaacatgacagaggcgtattgccttttacacgagccgtttaaggacgggccgtatgacgaaaaggagcttaaaagagtaatgaaagccctttccgactttgggccgaagatcgtcattctgacgggtgcgtatacggacggggagaaaatcggcgcggcgtgctacgatagggaaaaagacgagacggcgctggtgctttccgaccgcgtgccgggcaaataccacggcacgggggatattttcgcggccgtgatgctgggggcgatgttaaacggcaaaacggtaaaggaagcctgtgccgccgccgtgcggtacaccgcaaagtgcatagaagaaacgagaaaagcatgcggtgacaacaccatttggggcgtgaaattcgaaaaatgtctgccgtttttgatgcacgatgtgctcacggagaacgacaaataaagtcttttgtcaagttttcttcagaaaacttgcgggttcttagggtagcgccctaagtcgctttccgcagaaagcgaaatcttattgcctaacaaaaaactaagaatggtagaaagcaatgctttgcattgcttgaacagtccgggggactgtttagccgtagaaaacccagttgcataggttccctgaaaggacggctcaatgccgccctttttatatagctgtgagcatacgttgatgcgcgttatctcttccttttcctcaatcagagggagtctgaaattaaataaaaaccgccggacatcgcaggacatcagaggacattgtaggacatcggaggacatgaatttgaaaagtttcccttttgagggaaacttttctgcgttttgggggtatgggtgaagagacaaacaggcggacgaaaaaacaaacgccgtttggcgcttcaaaactttcagagaggatgtggaacatggtgaacgaaacggcgaaggagggctttcgcagattggcgttcggcggtattcatgatgccgtaaggctgcttttttgcgaggacgtgaacccgcgcacgctgaaaaacatggatctgttcgccgtctccgaaattcgcagaccgaaaaacggcggcatggaaattcggtttttcgaccggatcgaagcgctgcggctcctcagcgagctcgagacgagcggggcgggtgcacaggcgctgctctccgccattgaaagcggtgcggcggcgctgaaagacggggataagccgtgacgccgttttccgaaaagcagatgcaggtcttgtgctggtggggcgaaaaaagcccgcaccgggataagcttgccgtcatctgcgacggcgcggtgcgcagcggcaaaaccacctgtatggggatatccttttttctgtgggcgatggcacgctttcaaaatacgagctttgcggtgtgcggcaaaacgatccgttctgtgcggagaaatgtggtcgcggagcttataccaaagctaaagtctatgggcttttccatgcgtgtgcggcaggcagagaacgagattatcctatcgtatcagggcagagaaaaccgcttttaccttttcggaggacgagatgaatcgagcgcggcgctcattcagggcatgacgctcggcggcgttttgtttgacgaggtggcgctgatgccgcgctcttttgtggagcagggcattgcgcgctgttcgctgaaaaacgcgaagctgtggttcaactgcaacccggagcacccgcagcactggttttaccgcgagtggattttgaaagccgagagccgaaacgcgctttacctgcactttacgatggaggacaacccgtcgctcagtgaagatgtgcgaaagcgttaccgaacgatgttttcgggtgcgttttacagccggttcatcgagggcaagtggacggcggcgacgggactgatttatccgtttgcgcttgacctcctgtgcgaagtgccgaaagcggactttgagcggtacgcggtgtccatcgattacggtacggtaaacccgacctccatgggcctttgggggcttttgtgcggcgtgtggtaccgcgcagacgagtattactttgacgcgcggcttgaaaacacgcggcgcacggacgaggagcactttaaggggtttttggagctcattcgcggcagaacgcccgatgtcatcgtatgcgacccctcggcggcgagctttatcacacttttgcagagccgtggttttgcagtgacggcggcgaaaaacgacgttttaaacggcatccgcatgacggcaacggcgctgcgcacggggcaggtcaaggtgacaaagggctgcgtggacgcggtgcgggagttttccctctaccgctgggcagacgacggcgcgcgggatgtgcctgtgaaggagaatgaccatgccatggacgacatccgctattttgtctccacggtgctcggcgcgggcgaaagctttgcctgcgcggtgcaaagggagacagggaaaggagttagcatttgggatttttgaaaaaggagaagcgcacggccgtttcggtgcagacgcagggtgggtacccgccggtactgccggtgacggcaggcgagcgtgcactgtaccgtgccttgcgcgagcaggtgccgatcatcgacgcggcaatctacaagctggtgcgtcttatcggcgggtttgaggtgtattgccccgaaaagcacacggaaaacgcgctgcgcgggtttttaaaaaccgtgcccgtaaacggctgcaacatgggcatcgataactttttatcggcctattttgagcagcttttaacgtatggcaatgcgattggggagatcgtactcgcaaacggggaaattcgggcgctgtataatgcgtcgctcgaagacctcgagattcggctcatctcgccgcttgaaacgggcgtgttcgtcgtaagggacgggcgtgcggagccgtgccgctacccggagctcattttgacttcggcgttgaacccgatgccgggcagcgcgatgggaagctccattttaaagggcctgccgtttgtgagcgaggtgcttttgaaaatttaccgcaccgtcggcatcaactgggagcgcatgggcaatgtgcgctttgcggtgacgtgcaaaaacgagggctacatgaacgcgggtgaccgcgcggggcagcttgcaaaggagtggagccgtgcgatgcacggccccggcgtgagcgactttgtggcggtgggcgacgtgcagattaaagccatcggcgcggacgggcagcagatggacagcgaagtgcccgtgcggcagatgctggagcagattgtggcgaaaatgggtattccgccgtttttgctgggactttcgtggtcctcgacggagcgcatgtcgagccagcaggcggacatgctgacgagcgagctgacggcgtaccgcagaattttggagccggcggttttgaagatctgcaaaacgtggctgcggctaaatggtcttgacgacacggtggaaatcgattggaacgagatcacgatgcaggacgaagtcgatcacgcgaacgcggcgtatctcatggcgaagacggagcagcttttaaaggagggggaagcttgagcgaaacggtaacggcggtacagccggataaagcggcgatggagaagatcaacctttacacgcgccgcgcctataagccggaggaggtgtacacgttttcggtcgttttgtgcgacaacgaggtggatagggacggtgagtgctttacgaaagagacactcgaggagcttgcgaagctgtttgtcggcaagacggggattttagaccacgagccgacgagcaaaaatcagacggcgcgcgtgtttgacgctgcggtgaaggaaattcccggaaaggtaacatctttaaacgagccgtatgcgcagctcacagcacaggcgtatgtgccgcgaaacgacgggacgaaggcgtttattgaatccattgaaagcggcatacgcaaggaagtcagcgtggggtgcgcagtgaaaaagcgcgtgtgctccgtgtgcggcgcggaaagctgcgtgcacgtgccggggaaaacgtacaacggcaagcgctgtgtgcgtattttaagcggcgcggcggacgcgtatgaattctcattcgtggcagtgcctgcacagcgcgcggcgggcgtggtgaagaaattttcgccgcgctttgaagaatcggagaagaaaaaggaggtcaaaacggtgtacgacattgtaaaaaagctcgcggacggcgaagacagcgtgacggtggcgaaggaggagctcaacatgctcaaaacggagctgaaagcgcttttcgaccgcgcggagtgcggcgaccgctaccgtgcggcgctgtgtgaacgcatctataagctgagcgccgtggcgcagccggagtttaaacgcggactgacggaggcgatcacaaagtcgctcggcattgcagaactggaagaaatggcggcggcgctcgcaaaggcggcggagcggaaaatgcccgtaatgccgcagctggcagcggaaaagacggaagacacgaacgcggcagacgacggcgcgttccgcatttaagaaaggagactatacaatggcatttgaaaacattacactcgaaaaaggcatgtacggcgtgccgggcaagaattttacacaggttttggaggagctggacggctcccagaactacgcgggcacaccgtttgcagggcttgatgcgtaccagagacagcttaaacgcttcggcattcgtgtgagcggtgcgaactgcgacaccgtggagaagtttttcacctcctcccagagcgcggcgctgttcccggaatacgtcgcccgcgcggtgcgccagggcatggagatggcgtcttccctgccggacatcgcggcgaccgtgacgaagatcgacacgctcgattaccgcaccgtgcagacggcgacggcttctgaccagaagatcgaagaccccgtagcggagggcgcagccattccggagacagtcatcaagacggcgggctcgcttgtgacgctgcataagcgcggcagactgattgtcagctcctacgaagcgctgcgccaccacagactggacctctttacggtcattctgcgtcagatcggtgcgtacattgcgcgcagacaaatgaaggacgcagtggacgtgctgttaaacggcgacggcacgaatacgggcatcaccgtgacgacgcttaccgctgcgccgacctacaacgaccttgtgacgctgtggggcaagctttccgactataacttcaatacgatcctggccggaacgactgctttgcaggcgctccttaagatcacggagtttaaggacgcgcaggcgagcctcaacattaagggtgcgggcaagctcatcacgccgcttggcgcgacgctcatccatgtgccgtccatggacgcgaagaagatcattgcgctcgacaagaactgtgcgcttgagatggtgcaggcgggcgatgtgctgaccgactacgacaagctcatcgaccgccagatggagcgcgcggccgtgagcgccgtggcgggttttgcacagatctacggcggcgccgcacagggccttagctactgattttattcgattctggcaagccgtaccgctttggtacggctttgccgaataaaaaaaggaggggcaaatggagatacgaaacgtgctggaacggctgaagcttttgacaaatgacgaccgcgaagacctgcttttgatgctgagcggcgatgcggtgcagcggctgaaagcgcgcctttgctgcactgtggaggaagaaaacgcgcatgaggaagcgctgtgcgcagcggctgcggcgcaggcggcgtatcagttttggcttttggaggaagcggcatcgccgaaaagcctgacggcgggcgaggtgcgcgcggaatttgacaaaggcagcgaaagggcgctcgcctatgcaaagcagtgcgagcgggcggtgttcgggcttttgcgtgacgaggatttttacttcggcgtgacggaggacacggtgtgaggaatgtatttttgagggcgcagcggatgacggcggagataagcggcgagaaggttgtttgccgcggcgttgtgcatcgcctgaaggaagacaaaacggccttgcaggcggaaacggagacgttcggcggggcgatgaagccgctgtatgtctacttcggcgacggcaaagtgctttgcggcgcggagaacgcgaggctgactgtgggcggcgagacgttccgcgttttatatgccgaggaaaaaagcgggatttgcggggcgctttacgtgcgcgcggtgctggaaaaggaggaaaaagatgacgggaacggagcttagtgcggcgcttgcggaaaagctgaaaatgcttttgccggactgcgcggtgcgcccggcgtttacgggcacgctgcaaaggcttccgcagcgtgccgcggtgacggtgggtgtgatgcaggaggaaaacgcggacggtgtgtttgaaacggtgctcggcgtgcagctgtatgcgcgcgaaagggacgaccacgcgcggctgtttgacgcggtgtgtgcggtggtatcgtctttgccgtgtgcgctgcgcagtgtgaagcggagtgagacgacgtactcggcggcgctcagttgccttgtgacgctttgcacggtgcaggcggcgacgggtgcggcggataacgcacgcgcggcggtggtgatcggtgacaaggtatttacggcggacgcggtgaaggtttcgcacgaagcgaaggtcaagcgctattacgccatcggcgaggaaaatccgtatgcggcggtggcgggcaaagcggtgtacacgattgtgctgcacgggttttcgggcggcgaggaggcgctccccggcgaattcacactgcaaacaggcggcgcgcggtacacgcactgcgttttgaaagcggcgagcgaaaataagcttgtgatagaagcgggtgcgtgtgaaaaaatcacacggcgaacacaaagcggaacggaggcataaggtggaagaagaaaacaaaaacgcacaggcgctctccgaaattttggagcgcgaggagcggcgatattccgcgccgcttcgtgcggacaggaggtttgcatgaacctgatgacgatgcagtttggcagctttgtgtttccggtgaacccgacggaattaaaactcgagcgggcgtgcctgctgcgtgagacggtgggtgttgacggcgaagaacgtgtggaggcggtcggcaagcgcaaggcgcgcgtagcaggtaaggggcacttcaccggggagaatgcgatggcggtttaccgcgaattagaggcgcttttcggtgaaacagagacgctgtacttgccggggcacaggccgtttgaggcggttttgagcgagcttgcgctcatcggcgtgccggagaaaaacacggtgccgtacacattcgcctttgtggagacggcggggaaaagcgaagcggtctccggccggacataccgcgcgaaggcgggtgagagcctgtgggattacgcgtattttacgggcgtttcgattgaccgcttggcggagaataaccggcatatcgcgtgtattgcggcgctgaaagacggtgaggaggtgcatgttccgtgacggagttttcgcttgagtttatgtttgcaagcggtgaaaaacactcacctaaagcggagccgaacgaatggcttttaagaagcgacgcggatacggtggcggacagtttgacggtgcggtttagtgtgggaaagcggctttttacggaagagcccgtgggggcggtgcttaaaaaggacggcgcggtgctctttgacggtatcgtggacgaacaccgcgtgaaatgccggaacggcgcgcgcacggaggtcttcttcctgcgcagccgcgcggcgcttttgctcgacaacgaggcggcaccgatggagcttagattgccctcgctgcggcttttggagcggatgtatctgatgccgctggggctgcacgccgtgggcggcgacaggcggccggtggagggcgttttgaccgtagaaaagggcgtgagctgttttgaagcgctgcaaacgttctctgaaagatacctaaactgtacgccgtatacggacaaaagcggcggcgtgcactttgaaagctacgtgccgaaaacggtgaagcccgaccgggtgacggcgcaggaggtgattttttgcccgtacaaaatgctgagcggcgttacggtgcaaaacgcgcagacgggcgcatacagcgcggaatatcacgatcctttggccctacaggtgcgcgtgcggtatctttccgcctatgcgaaaacagcaccgacggcgcttttaaatgaaagccgcagggcggcaaagcgactaaagctgacgtgtgcttcttatatagacgggaacatgagggacacgatgcggacggaggagcttggcgaggtgcggctcatctccaaaaacgttttactgcgcgggaaagacgtgaagaccgagctgcattttgaaccggtttaaaggaggcatgaacatgtggctgacgaaaaaggagacggcggaaaaggccgaaagcgtgaaaacgggcgttgtgacgacgggcggcggggagatttccgtctgcacggagctggagcgccgtgcaccgactgtaacggtgccgtacggcatggcggtgagcgtgccgcagggtacggaggctgtgatgaccggcggtgtgtgccttggcgttgtgaacgacgcgggaacgcttttgcccggcgaggtgcggctattctcaacgggcggtgcggagatcgttttgaagctcgacggcacggtcgtcatcaatgggcaggtgtttgagaaaaaggaggaatagcgtggaggtcgtgattttaaacggcataacgcagacggcggcgacagggctgccgaagacggccgaggggcttaacgcgcttatgcagcgcgcgtataaccgcatttgcctaaaacgcagcgcgttttgctatgaccgcgtgctcggcagccggttttatatgctgaatgcagcggacgagcacgccgaggagcgggcgctgcggtatgcgcaggcggcgctgttgcccttagccggtgttgaggcggtctccgtgcggcgcgagggggagcgttttatcttcggactccagacgatgctcggcacgggggagattgcggtgaaaggggcgaaagtgtgaaatttgaggaaatttatgcgcacatggcggcggaatacaaaacgctggcgggcgtggagcccgaggacgcggcggacgtttcgatccgtctgaaggtactggcgggcgagctgtatacggtgctgtgcgcggcggaatcgctgaagctgaattgctttccgcagacggcggcgggcgaggcgcttgacctgcacgccgaagagcgcgggcttgtgcgcaaggacgcggtgaaatctgtgggcacgctgacgttttcgcgccgaacggcgctgagctacgcggcggagatccccgcgggcacggtgtgtgcggcaagcggcgaaaacgcggtggaatatgagacgacggaggcggctgtgctgcccgcaggcgcactgacggtgacagcggcggcgcaggcggttttgggtggcaggcgcggcaacgcggcaaagggtgcggtgaacacgctcatcacgccgccagcgggcattgaaagcgtgacgaacgatgtgccgtttacgggcggcgcggacaaagaggacgacgaagcgctgcgcacgcgccttttgcggtgcttttacgcactgccgaacggctcgaacacggagacgtaccgccgtgcagcgctgatgacaccgggcgtgaaaagcgttcaggtggtgccgcgcgcaaacggtgtgaacacggtggcggtgtacctgtacggcgacaacggcgcggtgacggacgaggtgctcggaaaagtcggagagacgctcgaaaagctcaaggagatcagtgtggacgtgacggtggctgcagcggtggctgtgaaaaagccggtgacagtttacgtgaagccgaaggacgggtgcgcgtttgaagatgcgaaagcatcgtgcacggcggcaatcacggcgtacctgaatgcgtttgaggtgggcgagccgtttgtgacggcggggctaatccatgcggtgatggagacgggcgtagcacaaaactgcacggtgccggcgagcgtggcggactttacgccgaacgccggggagatcgttacggcgggcgctgtaaatgtgctggagacgcagtaaggagggcaaatgacggaactggaaacccgcatgcgcgcgatgctcgaaaaaacggggctgtattttggcgaagacaagtggctttcggcagagcttgcggcgtatgcaaaggggcttgaactcgtgtatgatacgctttcttatgtgcggcgcgacgcgtttgtgcagacggcggaggaggacgggctgaaagcgtttgaatcgctgttccgcgtggtgccatccgtggacagcacgaaaaaccggcgcacgatgctgctgacccgcggcgcggtgacccccgcagaccacacagtggaagcgatgcaaaagcagcttttggcggcaggcatcaacggcaagctcgtcccgcaaaagggcggcgtgctgaacataaatgtgctctctaccatgggcatttccgaagcggcggcagaaagcgaagcgcgcgcgtttttgcctgcgcacctcagtttggtgttcgatttcggcaaaaacacgtgggacgcacaggacgcggcggggagctcgtggaatgtgctcgaccttcgaaacaagacttggaacgcgctcgacgttttatgagcggaaaggagaaacatggcagcaagtaaaaaatcaacggttctcggcctttgcctttgggaggggacggacaagccgcgccgtgtggattttgtggcggacaacgaagccatagagtcacagcttggcgggcacattcaaaacgataacctgcatttaaatgacacgcgcagaaagcgtttagatacgccgacggaggtgcgcacgtacacgggcacgggtacggcctcgcgcacgatcttattcggcttcagtccgagtgcggtgatcgtttttgcggtgggcaagccattttcgcaggcgacgacgggctgcacaaagcaatacgccggcatagcggcaggcggccagaacagccttggcgtgacgctttccacggcgcaggtgacggtgcggcagacccaaaccgccccgacggacggcagcggcatggcatcgctgaacgaaagcggcgtaacgtacgcggtgttggcgtttcgataaggtattatatcattttccgcgaggaaaatatcatatcgaacaaagagagatatatcattaaaaaagaagcgcgcagcttttggaggagctgcgcgcttcttggtgtattgcgtgtaattctaagggatttctaaaggcggtttttatgaatttgccgcgcaaattcattgggagaccccctaattgggtctcccacgaacaaacagtccaccggactgtttgttctcccgtcctgatttttgggaggcaaaaggtgtttcgtcgtctgcggacgacgaccaaaggcgctgcctttggaattcgcaagttttctcgaagaaaacttgactaaagactttattcattcgtttgccgcaggcaggtgttagccttgcgtttcgcctttatcttcgagcagggtaacggtgacggtgaattcttcgccgcctacgccgctctcattcgggcggaacaggtggatctcggcggtatcgccgggcttataatttaaaagtgcgtttgcgagctcttcgagcgatttcgtttcggtatcatcgatggcggtgatgatgtcatacgcctgcacgtctgtgccgttaaagcagctgtcttcgtcaatctcgttgatcatgaagccctgcgggacgtcatacatggcggcctgcatctgggtgatggcagtgcccttgatgccgaagcggacgcggccttgcacataaccgcctgcaagcaggtcgtctatgatgctttttgcaccggtgatcgggatggcgaagcccatgccctcgtactgctcggagacgattttagcggaactgatgccgatgacctgaccgtgtaaattgacaagcgggccgccggaattgccgggattgatggcggcgtcggtttggatatacgtcatgccgttcgagctgtacgagccgacggaacggttgaggcccgagatgacgccgcgcgtgatggagccggagaactgctcgccgcccgggttgccgatggcgacgacccactggcccatgcgcaggtcatcgctgtcgccgaactcggcgggcatgtagcctgtgccgtcgattttgagcacggcgaggtcggtggttttatcgaacccgacgacgacggcgtcgtgaagttcaccgtcatacgttttgacctgcacggaaacggatttggaatttaaaatgacatggctgttcgtgatgatgtagccgtcttccgttgcgaaaatgccggtgcctgtgccctgcgtttcgccgctctgcgtgatgacgagcacggtggacgggatgaccttatcgtacacggcatcaatatcgagctcggcggtattcggctctttatctaaggtgatgccttctgtattcggggtgacggcgatgtccggtggggtgaagctgtcgtccgcatcgggcgtttcgtcttcaccgggcgtttcgctgtcgctgccgtcgttttcatgcgggaagttcgggatgagcggatcgcccggcagcgttgtgacgccgtaaccgcggttcacggcggcgtagatgccgtaggaagcaaagccgatgacggagcctgcgacgaggacggacatgacgatgatgaggatgcgcaacccgagcggcattttccttttttgcggcgcgggatgcggatacggattttgcatattctgcgggtacggcgggggataagcaccctgtccgtagggcggcgggtactgccccggctgcggctgggtattgtagtttgcatagccatacggcgggtttccgtactgcggggcgtttggctgcgtgttgtacgggtagggctgatacggcggctgcgggggataatagccggtatgctgaacgggctgcggctgcggcggaatgttcacgttcgggctgggctgggcttccgacgcctgctcggcattcgggagcggctctgccgtggggacatcggaaacggtcggttccggggtgacagtcggttctgcgggagcggccggttcatcagaaacggtgggctctgcgggaatggtcgccgcggttttcggtgtttcggggatattgtcttcggaagaagcaggctcctgcatttccggggttttgttttcaaaatcgtccatggtgtgatacctcacttttggatttatttctgatcgggctctttattatccttgtggccgtggtgctcctttttgggacgctccgagatgacggcatcttcgaccggcacggtgaccgggatggagccggtattgtacttcaacttcgggggttcctgcggcttcggaatatagaacgagaagcgggtgtactcgttcacgacggaggagacggaaatgtcgccgccgtggagcttgatgatggtgcggacaaggtacaggccgagacccatgccgtttttatcctgacttctcgatttatcggtcttataaaacttctcaaacacgagggggagctcatcggactggatgccggagccgctgttttcgatggtgacgacgatgcggtcgatgctgtccgagacgttgaaggagatgtagccctcggtgtttgtaaacttgacggcgttttcgataaggttatagacgacctgatgcaaaaggtcttcatcgccgtgcacctgcatgggctgcaaggtatcgagcccgcggatgtcgatcttcttttcgtcgatgctcttttcaaacgtgagcacggtggagaggacggtctcggaaatatcgaaatcgtttgggcggagcttcagctcgccgttatcgatgcgggagagatttaacatagtgcggacaagacgcgagaggcgcttgacctcgtcggagacgatgtgcaggtaatgcgactggcgctccggcggaatggtgccgtccagaatgccgtcgataaagcccgcgatggttgtcatcggggtctttaactcgtgcgagacgttcgcgacgaagctgcggttcatgctttcgctgccggagagcgaatctgccatgttgttgaacgcagtggcaagctggccaatctcgtcattgcttgtgacgggcacgcggatggagaaatcgccgtcgccgaagcttttggctgcggcggacatctgccgcaggggcttgacgagccggtaggagaagaggccgacgacaacgaacgccagaatgaacgcggcggctgcggcgatgaggaacatttgcagtgcggcgaactgatactccgtgagggaggcagcgttcatggcggcaaaaacggcaccgacgggcactctggtgctgttttcgtctcctgcctcggaagatgatgtttcggcgacggaataaagcggcacgccgacgacgtagtacggggtatcgtaaatgccgtttttgcgtccgtcaccggtataggagccctcggacgcgcactttacgatgtctgccgaaatcttcgtctgcggggtgaagtttgcgccgatatttgaggtgctgttggcataggcaccgaacaggacgttgccctcgagatcggtgacgaaaatatcggcatcaatattgagagagaacgtgcgcacaaagactttcagaagctccggtgcaccgttattcgtgatgtctacgacggaagtaatggacgccatggatgaggcgttttgcataagcagtttgcgcttatcgcttttggtgtactgcgagaacacaaacatcatgacgctgccgagcacgatgaagctggcgagcacgatgaccatggtgacgcgcaggtattttccgaacagggatttttgcaaggggaatccttcctttcgccggcttattctttcacttcaaacttatagccgacgccccagacggttttaagcgaccacttatcggaaacgccttcgagtttttcacgcaggcgcttaacgtgcacgtctacggtgcgggaatcgccgtaataatcaaagccccacacttcgtcgaggagctggtcacgcgtgaagacgcggttcgggttcgaggcgagatgatagatgagctccatttccttcggcggagtgtcaatctggacgcccttgaccttgagttcgtaatttgtgaggttgatggagagattctcgtagtgaacttctttcacctgagaggattcttttttgccaatgcggcggaggacggcattgatgcgcgcgatgacctcttttgtctcgaagggctttacgacataatcgtccgcgccgagctctaagccgaggactttatcgaacacttcgcccttggccgtcagcataataatggggcactgggactttttgcggatctcgcggcagacctgccagccgtcgagctccgggagcatgatgtcgagcagcatgaggtccgggttgacggaatcaaacatttgcacggccgccttgccgtcgtttgcaatggctgtttcaaagccttccttttcgatatacaatcttaaaagctcacagatatttctatcgtcgtctacgatcatgattttgccggatgccataaatttctaccttccttatttcaatattgcggggcgaaaagcgaacccgtttcctcccggaaatcccctgtttgtgcagagtatgaccagtttgtatttattgtaccgatttattgcgtcgaatgcaagaacaaaaggtgaatattctgtgacgatagggcttgttttgggacgcggaattggtgaaaatgcgcgtttttatgcgaagtgttgcggtgaaaaataaagtgtgttatactgtatcagttcgattttagattgtgaacaggataacggtcggacaaaatgaaaactaaaggctttaaacagcgtacttcgccgtgcttgcggcgaagtcttttcatgcgaaaaaccgcgtttggagcgtagagatttgcaaaagaatttacaaaaaagaaaggaagtttgattttatggcggaaaaaacggtgaagcttgaggacccggcaaacaaccgcatgggctctgcgaagatgctgccgctgattttgacgatggcgctgccggcaatgttctcaatgctgattcaggcgctttacaacattgtggacagctactttgtggcgcaggtgagccagaacgcgctgacggcggtctcgctggcgttcccgattcagaacctgttggtggcattcggcgtgggcaccggcgtgggcgtgagctcactcatttcccgcagactcggcgagcgcgaccaggaggcggcggacaacgcggcgacgcacggcattattctttccgcgatcacgtatgtggtctttgcagttttcggtgcgatcgtggcgcgtccgtttacggcgctttacacgcaggacgcggaagtgctcagcatgggcacgacgtacatcacgattgtgacggtagcatcgttcggcttcttctttgcggcggtcattgaaaaaatgttacaggcgacgggcaacatggtgatgccgatgatcattcagcttgtgggcgcggtggcaaacatcatctttgacccgatcctcattttcaacttcaacatgggcgtggccggtgcggcgtatgcgacggttggcggccagatcctttcgatgattgtgggcctttgcattttgtttttcggcaaccacgcgattgcgctggaatttaagggcttccgtttccacggcaagacgatgaaggacatttacgttgtgggtctgccgagcatcgtgatgaacgccatcggtacgctgatgaccatggcaatgaacggcattttggcaggattttccgcagtggccgtgaatgtgttcggtgtttactttaaattgcagtcctttgtgtttatgccggtgttcggcttgacgcaggggctcatgccgattatgggctacaactacggtgcgcgcaacaagaagcgtgtgacgggtgcggtgaagatcggttgcgtgattgcgcttattattgagattgcgggtcttatcgtgtttgaaatctgcccgggcacgctgatttccatctttaacgcgacgccggagctgcacgagatcggcgactcggcgcttagaatcatcgcgatccacttcccgatggcggcgatcggcattgcgctttcgacgctgtttcaggcgacgggccacggcatgtacagccttgtgcagtctgtgatgcgtcagctggttgtgctggtgccggcggcgtggctgctctcgaaaatcagcctcggcgctgtgtggttctgcttcccaatctccgaatttatttcgctcattgtgacggttgtattctttgtaattctctacaacaaggagattaagaacctcgataagccggtgaacagtgcggcggcgacggagtcggtgaaggggtaagtgagctgaaatagagcgggcaaataaagttttcgacgacctttttcaaaaggtcgtggattccaaaggcaaggcctttggtcgagctccgcagagctcgaaatacttttgccaaacgcaagatcaggaaaatagaagaaccgtccgggggacggttcttcgtaagaaaccctatcaagggggttcttgaagggcggctttgtgccgccctttttatatatgctgtggcttacgttagataaagaaccagctggggagccattctaaggcgttggcgtagttctgcgtggtgagggtgccggtgagcacggggtagaacgcgatgaacataagaatgtgcacgaggacgcaggcaagcaggagaattctgccgactgtgagcgtgacggcgccttttgtgaaaacgacgcggcgcagggaagctgtttcttcaaggcgctgatacgcgatgaggaacgcgatgagaatgaacggcacggcagtgaaatagtggtaaatgaacgtgcagcgcggcacgagtacccatggcagatatgcggacaagaagccgatgacacagatgagcgcggtgcgggagtgccgttttacggcccttacgaacgcgtacacggtggcgggcacgcacgcccagaagaacagcgggttaccgagcaccgaaatggtgcggatgtggccctcgctgtcggcgctgtaattgccgtaataccacacgttgcggatatcgaacggccattgataccacggggactcaaacgggtgggtcgcctgcagcgtggagtggtaattatacatatgcgtttggtacgcgatgaaccggccgaaaacatcgtagcggttatgcggcaatgtggtgagcggcaggaacgccgtaaagtagatgccgaacggaatggcgatgaacagcaggcagcaccagaggcagagctttatggatttattaaggagcgctttctgcacggcggcgtggcctttctcttcgcggtaagagacgatgagcttgccgaagaacagcacggcgaggccgactgcgccataggcgaccgtccacttgcttgcgatgccgagccccatgaagatgccgcttaaaagcagcgggggcaggagctttttgaagctgtcggtttttaaatcgtgctgaataaacacgagcatggcgtcgtacattaaaatgatgaagaacacggcgtaggtatcgatggttgcgatgcgtgtttggacgtagtgcatgaaatcgaacgcaaagaggacggtaccggcggtgcagaggaacgtggagccaaagaggcgctttaagaaatggtagagcgcagggagcatcagaacaccgaacagcgtgcccatgaagcgccagccgaacgggttcatgccgaagatgcgaatgccgaccgagatgatgagcttgccgagcgtggggtgcgtgttttcgtatggctcgagttctaaaatgtgctcgtaggcggtgcgggcgtggtagatttcgtcgaaataggtggagttcatgtagcttgggtagagcgggacggcgttttgctcatccgtgagctgccacgcgttgccggagacggcggtgagcgttgcaaagccggtgccgtctgtctttttgagcgcgaactcgttgatggcgaggtcgtcgcacatagacgtgatgcggatatatttgccgacggcggcgacggagacgtttttccacgcatagacgctgccgtccgtgttttcggcggcggtcgtccagttggtttgatcgtttgaaacctcaatcttcatattggtaccgacgcgctggccgatgccgttatccgcgggggcgatgccgggcaggtagaaaatttcgctgtacgcgtcgtcggtctcaaagacggcggattcgccgttttggggcgtccatgtcgtattggcggtctcgtgatcaccgagattcgtgaacgcgacgatgccgtaaaggagggtaacgacggcgatgcagagaagatcgacacgcgtcaggcggacgttatgattcttgtcggtgatgagggagaattcgggcgctgcggcgggctttgtgtgctgttcggccgaggcggctttctgcgttttaaacgcagggagcgggcgcagggctttttcggaaataaagcagcggtacgtgatatagagcatataaatgtacaggagcacatgcagcgcggagaggaacaggatttgaatggacgtgggggaaatgtaggcgttattgagatacaacacataggcaacgttcaaaaaatgcaccgtggatatgcccgcgaacaggagcaggaagcgcttttcctttgtgaaaacgtaggtgagcagcaggcacaggagcacggggaacagataacgctcgtgcattttgacgcagaaaatgtagaccgtgaacatcaaaacggtggggcaggcgaaaacggcgtcgtcgcgcttcgatttcagcagtaagaggcctgcgaggacggttgcgagcggtacgccgaattgcagccaagtgctgtgctccggcagggcagcccagttgagcccgaagagtgcccagacgttataggcgttgatggtgtagtaattataataatcgatggtgccggtgtagatttcgatgagcttcagataatcgaaattctttataaacggcgtggagagcaggagaatcgtcgcaagggcgatgatgggcccgaggacgaggtttttccagtcctttttgcggatgacccagaaaatgagcaccggcgcgaaaataagcatctgcggcttacttaagatgccgaagccgtagacgaacgcggcgagcggcgtgtggttgtaccagagaagcagcagtgtgcagaggagcagaagcgcgcagaagctatcggcctgaccccagacggaggaattgacgatgacggcggggcagaaaagataggcaaacgcgataaggagcgcgcttttttcaccgagctttttgcgggcgagcacccaaagtgccgcggcgcaggcgatgtccgacaaaatgggcgcgagctttatcatgagcgtatagctctgcgcatattggtcgacaccgaacaggcggcggaacgcctcaacgatgtagagaacgtagagatagccggggggataatcgaggaagaagtcccggtaatacatgttattaaagccgtaatcgtgcgtataggcggcccacgctttaaagcaggagatgtcggcctcgaacccgttgatgttgtagcccagaataaagcgcaggataagccccaaagcgagcacggcgcagaagacgggcacggggggtaggccgaagaccgtagcttcctttatacgggcgcggcggacgggggcgccctccgtttccggcgcggcacgaaagccgagccacagcactgccgcaaggaacagggcggcgagcagaatttgtatcgtcatggtttttgttcctttctcaaaatttatttggttacgggcttgacccgcacctttttttcatgtaatcttgtaatagaggggatgcggaaaaatccccgtctatgtacgctcattatagcataggttctaaatcgcttcaactgaattttggagtgtttcaacacacgcgtggaaaacgttttcacgcaggaaaggaacggtattgataatggaatttcagaaaatgcacgaaaatccggacgtgctgcacgtgggtacctgccagaaccgcagctacttcttgccgaaggcaccggaggacggggaagaatccacaagagtgtgtcttttgaacggcacatggtcgtttcggtattttgactcgtttttagacgtgttcccggagggctccgagggtgagatttgctttgacgaggaggatatggacgagattgaggtgccgtcctgctggcaaaatgcgggctatgaccgccaccagtacacgaacgtgcgctatccgttcccgtatgacccgccgtatgtgccggacgagaacccctgcggtctttatctgcgccgcttctgcatgaacgcggaagacctgacgcagaaaatttatttgaactttgagggcgtggactcctgcttctatctgtggatcaacgagcagtttgcggggtacagccaggtttcgcattcgacaagcgagtttgacatcacggatttactgaacgagggtgaaaactccgtggcggtgctggttgtaaagtggtgtgacggctcgtatctggaagatcaggacaagctgcgcatgagcggtattttccgtgacgtgtacctcatccgcagacctttggcgcacatccgcgattactttgtaaagacgacggtgagcgatgacctttcccatgcggatatccgcgtggagatggactttatcgggctgccggacgtgacggcggagctgtatgacgccgagggtgctctgctcgaaagcacggcgggcgcggagccgaactttgcgctcgaaaacccgcacctttggaatgccgaggacccgtaccagtacacgatcgtgttccgcacggcggatgaagtgatcgagcagaaggtgggcatctccaaaattgagatccgcgacagcgttctgtatttcaacaatgtgaaaatcaaattgcgcggcgtgaaccgccacgacagcgacccggtgacgggctacaccatcagccgcgagcaggcgaagcgcgacctgttcctgatgaagcagcataacatcaacgcagtgcgcacaagccactacccgaacgcgccgtggttcttacagctttgcagcgaatacggcttctatgttattgccgaggcggacattgagggccacggtgcggcggtgcagaccggcggctacggcatggacgaatacgcggacaacgcactgaacccgattttcgacaaggcgattatggacagaattcagcgcagcgtcatccgcgacaagaataacgcgtgcgtgctgatgtggtcttacggcaatgagaccggctggggcccgagctttgagaaggccggcgcatgggtgcgcgaatatgacccgtcccgcttgacgcactacgagaatacgtattacgatgcgcgcggccacaagaacgacctgtcttccctgacgacggagagccgcatgtactcggcgccggagtggatcgatgaatatatggccgacccgaagtacacgaagcccttggtgctttgcgagtacatccacgcgatgggtaacggccccggagatgcggagcagtaccagcagctgatcatgaagtatgaccgctttatgggcggctttgtttgggaatggtgcgaccacgccgtttacggcggcacgacgcccgacaaccgcgatattttccgctacggcggcgattttggcgaatatccgcacgacggcaacttctgcatggacggccttgtgtaccccgaccgcacaccgcatacgggtttactcgaatataaaaacgtcattcgcccggtgcgcgcggcgcttgtgaaccgcgaaacgggggaaattcagctgacgaattaccgcgattttacgaacacggaagaatttttgacgctttcctgggagattcagcaggacggcgatacggtggcctgcggcgtgatggacgacatcaagattgccccgcacgaaagcggtgtcattacgctgccggatgcaattccgacggagggcgacgtggcggtgcttctgcagtacagtgcgaagaagaacgacagcgtgttctttgagaagggacacccgctcggctttgaccagctgatcgtttctcgcgaggcacgcaaggaagaagcgcttagaaagggctttgttgttgcggaggaggacagccgcgccgtgacggtgacgggtgacagcttccgttatgtgttctcgaagaccgagggcgtgtttacgtctatggtgaagaacaatgtgaacatcatgacccgcccgatgacgtggaacgtgtggcgtgcaccgacggacaacgaccagtttgtgcgcaaggaatgggagcaggccggctacaacgaacccgcgataaaagtctatgcctgcaacgcgaaagaggaagacggcgttgttgtgatcgattgcaagctgagccttgcggcggtgtaccgcagaccgttcctgcaccttgactgccgctttacggtggacgccgagggcaaggtaagagcggagatcaacggtaagcgcgacatggagcgtccgttcctgccgagattcggccttagaatgttcctgccgaagtcgtttgacacggcggaatattacggctacggcccgtatgaatcgtactgcgacaagcaccatgcgtcttcgctgggtcactttgcgcagacggcggacgacctttttgaggactacgtgaagccgcaggagaacggcagccacttcggctgtgcgcgggtgacgatcacagacggcgcgggcgctgtgaccgtaacgagcccggaggacttctcgttcaacctttcgcactacacgcaggaggaaatgacggagaagatgcacaattacgagcttacggaaagccccgacaatgtgttctgcttcgactgcaagatgagcggcgtaggctccaacagctgcggcccgcgccttgcgaaggcgatgcagtttgacgacgagacgttcacgtttaagtttgacctgaccgtggaataagacgggcaaaatttgataaatcagagccgccgtgtgggagtttttccgcacggcggtttttatctactaaatttatttattctaaataaatatattgacaaaatattgacaaatatagttttatgtgatagtattcaatcatagcaattacgaaagaggtaagtccaatggtttactacggttactaattcaagaaaaaatatcaacaaatcttagaaatgagggaaacaaatgggtatcagaatgaacaaaaaagtaactacagtggtgtcgttaatcctcatgatttgcatgtttattccgataatggctatgccagcatcagcaagcgaagttcaaaatgaagtaactccccgaagatatataattgaagaggtaccgtggtattacgatagagtcgaatactatgatggcagcagctatacaagtccgactgtatacaaagaactgcgtctgaaatccgcatcttcttcgtattcttccacctgcggaattaagttcatcaaccatgacacttactacaataacgtcaaagttaaaacatggacaagatgggagtacacatatactgtttacaactaaggagagctttgtcaaaagagattagatattaaactaaatacgaatgaattgaattatcatcgcctaatttgtaaattgcgtgatagcaattcatatataatgcgtataaaatatattgacttagttgagtaaatgttgtatacttcaatcaagcaaggggttgagtccgatggttttaatataagcgattccggtacaatgaggaagggagaatttgctatgaaaagaaccgttgtaattttacttgttttactgatgggattgctgaccgcgtgtgctgtgccgccgaaaacggaggcgaacgtgaccgacccggatgccatgaatgctaccgcagtgcgtcagacagaagcggacaccaagacggattgggcgcagggcttgacggaacagcaggaagtcgagacggagatcgaaaaagctgtgagcgcagatacgcttgaccgtttgcagcaggatgctgcgaagctgcttgaagagtacgaaacggcgaagctggacggcacggaagaggaagccgcaaagctgaacgaagcgtatgagcgtgtgcttgcggaaatcaatgcgatgctcggctgaaagtgaaaaaatggaatgtttgccgctgcatggctttttgggctgtgcggcggcgtttttccttaaaattttcgtattttccggtgcttttgcaaaatatcttgaaaataagtccgtacaaattttgcgaaaggtcttgcaaaaagttgtacggctttttataataaggttgtattgaacctgtgcaaacaggtatcctttttgaaaggaacgatgacatggcagacacagaaaagaaaactgcgaaatatcgctttctggtggataccatcaaggagaagatcaaaaacggcgaatatgagcccggcgaacgcatggaatctgaaaacacgctttccgagcagttcgggtacagccgccaaaccgtgcggcaggcgctttccgtcctcgagcaggaggggcttattgagcgcagacgcggcagcggcacgtatatcagttccgagagccgacgcacgccgcgcggcaatagcatcgccattgtgacgacgtatatttccgactatatttttccgacgatcatccgtggcattgaggagacgctgacgaacgcgggctatgatttgaccctgaacgtgacgaacaaccacgtggaggaggaagcgcgcattttgcagtcgctcatctcccgccgcgtggatggggtgattgtggagggcacgaagacggcgttcccgaacccgaacgtggagctttaccgcaggcttgaaaaaatgggcgtgccggtggtgtttttcaacagctattaccgcgatttacccgattccgtttacgtggtgacggacgaccgcaaggccggcttgcaggcggtggacctcttgattgaaaaggggtgcagacgtatcggcggcgtgtttaaatctgacgacatgcagggccacgggcgctacgcgggcttttccgaggggcttatccacaacggatgcgtccttggcgacgataatgtggtttggtacacgacggccgagcgcagcaggctttttcgcccggataacagcgactacatgtttgagcgcctgcgcgggtgtgacggcattgtgtgctacaacgaccagattgcgtatggggtgattgacctcttacagaaacacaatgtgcgcgtgcccgaggatgtgctcgtcatcgggtttgacgactcgagcatttcggaatactcgccggtgaaaattacctcttttgtgcacccgaaggtggagatgggcagagccgcggcgaataagctcatccacatgctgcgcagcagcgacccggagcagccgcttgtgctcgatatgccgctgcacgagaaagaatcgacaagacgataaattttgatataaaacagtttgaaaggaacgaatgaatatgaagattgagaaattatccccggcatttaaggactatctgtggggcggcacaaagctgcgcgacgtttacggcaaaaagtgcgactatgaaaaggttgcggagagctgggaactttctacgcacccggcgggccagagcgtgatagacggcggtgaatacgacgggctgaaattcggcgagtatttggaaaaagtcggtgcgaaggcgctcggtgtgaacggtgcgaagtttaaggagttcccggtgcttatcaagttcatcgatgcgaagcagccgctttccgtgcaggtgcacccgagcgatgaatatgcgctgcgcgtggagggcgaatacggcaagaccgagatgtggtacgttgtggactgcgagccgggcgcttcgttgtacttcggcgtgaaccgtgcgctgacgaaagaggaattcaaaaagcgcattgaagacaacacgctgacggatgtgctctacaaggccgacgtgaaaaagggagacgtgttcttcattcagtccggtacgatccacgcgatcggcgcgggaattctcatttgcgaaattcagcagaattccaacacgacataccgcgtgtacgactacggccgccgcggtgcggacggcaagctgcgtgaactgcatattgataaggccattgacgtttccaagctgaccccgagcgacacgtccgacaagcagggtaagccggaggagattcccggaggcacaaagtgcgcgctggcttcctgcccgtactttacgacggagaaatatgttgtggacggcgaagtcgaaattgacgtgacgggcgattcgtttgcgtcgcttgttgtgacggagggcagcggcaaggttgtcggcagcgagaacgaagtggagttcaagccgacggacagcctgtttgtaccggccggcagcggcaaaattaagattgatggccactgcacggtggtgaagacgacggtttaaaaggggaaacgctatgaagatggaatttgtagacgaagctgaactgcagaaagctgtggacgagccggagggcgaggtgcgcgggcgcattgtgctggtcggcgagccgatggggcttttcatcgcggaggagctcggcgagctggaggatgtgacacacttttcggcggctgtggccggtgcggaatataacgtggcggtgggactttcccgccttgaccatgaagcgctgtactgcacgcgcctcggcgacgacccggtgggcaaacgcattttaaagagcatgaaaggcaaccacgtttccgacgcgcttgtgaccgtgacggacacggcttcgaccgggtttatgatgaaaggcaggaccgaggcgggcgacccgaagatcgcgtatttccggcgaaacagcgcggcttcgcagatctcgacgcatgacatcgataagctcgacttatacggatgtgattttctgcacgtgacgggtatttttccggcggtgtcgaagtcggcattggacgcggtgaaacgattgatgagccgcgcaaaggcgctggatatgtttatttcgtttgacccgaacctgcgcccgcagctttggaaggacgaaaaagagatggtgcgcacgctgaacagcctcgcgcaggaagcagacctcgttttgccgggccttagtgagggcaaaattctcacaaagcgtgacacgccggagggtattgcggagttttaccacgagcgcggcgtggacagcgtgattgtgaagctgggcgacaagggcgcgtactggtccacgggcggtgagcacggcacggtgccggcattcccggtgaaaagaattgtggacacggttggcgcgggcgacggctttgcggcgggcgtcctctccgctgtggcggagggcatgtccttgcaggaggctgcggcgcgcggcacggtaatcggctcgatacagattacacaccggggcgacaatgagggtctgccgacgcgtgcggagcttgagaccatcacaaaagcgggcattgtgtaaattctaataataacggtgccgcgcaggaaatgagggtttgttctgcgcggcattgtgctatttggggagtgagaaaaatgggcagaaaagaaacggtggagctgacaaacatgtgcatggtggaggacggcaagggcaacgtactcgtgcagaaccgtcttgacccgaactggtcgggtatcgtttacccgggcgggcacgtggaagcgggggaatccatcacggcatcggtcattcgcgaaatccgtgaagagaccgggctgacgatcgaaaatccgacgctgtgcggtgtgaagcagttctggcttgataacggcgtgcggtacattgtgtttttgttccgcgcggatacatttacgggcgagctgcacggctccgaagaaggcgatgcgttctggctgccgcgggaagagcttttcgagcaccggacggtggaaagctttgagggcttagtgcacgtttttgagacgccggaatgcagtgaagtttattataaagacggcgaaacgcattttgcatgatttgaaatttgaattcgggaggaaaattttatgacaccgcataacgaagcaaaaaagggtgatattgcaaaggtggttttgatgccgggcgacccgctcagggcgaaattcattgcggagacgtttttggaaaatgccgtgtgctttaatacggtgcgtggaatgctgggttatacgggcttgtataacggcaagcgtgtttccgtaatgggcagcggcatgggtatgccttctatgggcatatacagctacgagctgtatcattgctacgatgtggaagcgatcattcgtatcggtacggcgggcggcattgcggacggcgtggagctgcgcgatttagtattggcgatgggcgcgtgcacggactcgaactttgcgcaccagtaccgtttaccgggcacatttgcgccgacggcgagctttgaactgcttgaaaaagcggtgcagacggcgagggagaagaacttacgttatcgcgtcggcaacgtgttgacgagcgatattttctacggcgactgtgaaaatgagaccgccgaatggaaaaaaatgggcgttctggccgttgaaatggagacggcggcgctgtatatgacggcggcgcgcgcgggcaagcaggcgctttccatcacgacggtatccgacttgccgctgaagggggaatcaacctcgagcgaagagagacagaagacgttcacgcagatgatggaggtagcgctggcggttgcctctgaggcggtggacggacatgacaaatgaggtcataaaaaagctttcggaagcggcgcttgatgtgcggaaaaaagcgtactgcccgtactccggctttgcggtgggcgcggctctgcttgcgaaaagcggtgaaatatacacgggcgtgaacattgaaaacgctgcgtttacgccgacgaactgtgcggagcgcacggcgctttttacggcgattgcaaagggcgagcgagatttcgtcgctgttgcaatcgcgggcggcaaggcgggcgaggagcccgaagacttctgcgcgccgtgcggcgtgtgcaggcaggtgatgcgggagttttgcggggacgcgtttgtgatcattcttgcaaagcccggtgaagaaaaggtttacacattaaaggatttgctgccgcagagcttttcgccgagagacgttctgggcgaaaaagcgaagcggtaaaaaaggcggtgatttttgtgctgcatattttggacattatccgcaaaaagcgggacggcgggacgctgacaaaggacgagattgaatattttgtgcgcgggtgcacggacgggagtatcccggactatcagctttcggcgcttttgatggcgatttatttaaacggcatgacgcacgaggagacggcggagctgaccttggcgatggcgcattccggcgacatggccgacctttccgcgatacacggcgtgacggtggataagcattccacgggcggcgtgggtgacaagacgagcatggttattgtgcctgtttgcgcggcgtgcggggtgaagattgccaagatgagcggccgcgggcttggacacacgggcggcacggcggataagcttgagagcattcccggtatgcggatcgatctttctccggaggaatttacagcgcagatcaataagatcgggtgcgcgatgatcggacagacgggcgagctgtgtccggcggacaagaagctttatgcgctgcgcgacgtgaccgggacggtggagagcgtgccgctcatcgcttcgagcatcatgagcaagaagatcgcttccggtgcagagcggatcttgctggacgtgaagacgggcagcggcgcatttatgaagacaacggaggacgcgattacgctcgccgaggaaatggtggagattgcgaagctttccggcaggcgcgcagcggcgctcatcaccgatatggacaggccgcttgggcacaccgtgggcaacaccttggaggtgctggaagttttggagacgctgcacgggcgcgggccggaggaccttacggaagagtgtttggagcttgcggcaaacatgatctggctcggcgagcaggcgaagagccttgaacacgcgcggaagaaagcgaaaacggcactggagacgggcaaagcgttcgagaaattctgcgaaatggccgaggcgcagggcgcggatgtgcggtacttgagagaacccgagcggtttgcgctttcgccgatgaaaaaagacgtgtgtgcgccgcgcagcgggtatgtagtgcatatcaacgcggagcaggtgggcatggcaagcgtgcggctcggcgccggacgcgagaaggccgacgatgtgctcgactacggcgcgggcatcgtgctgaaaaagacggtgggcgacgcggtacaaaaaggcgaggtgatcgccgagctgtacggtgcgagcgcagaaaagtgccgcgacgcggaaagcgtgctgcacggggcgttccgctacggcgacgagaaaacagaagaatgttcacttgtactggcaagggtagagtaaaataaaaaaccgcacctgaaaaggtacggtttctgtgcgttcggctttaacgtttgcgattaaaatcagccgcgctcggggccggtgacgggctcgtcgtaatcaacgccgaaggtctcgacggtgactttcgtcatgacctgatcttcgcgcgggcggtcggaccaatcgcgcggggaggaaacgatggcctgtgcgacatcgatgccctcggtgaccttgccgaatgcggcatactggccgtcgagatgcggagcgtcatcgaccatgatgaagaactggctgcctgcgctgttcgggcgctggcttcttgccatggagagtacgccggtggtgtgcttcaggtcgttcttgaagccgttcatagcgaactcacccttgatgccgtagccggggccgcccatgccggtgccttccgggtcgccgccctggatcatgaagccagggatgacgcggtggaagatggtgccgtcataaaagcccttctgaatgagggaaataaagttgttgaccgtgttcggcgcaatctcggggtaaagctccgccttgatggtgccgcgggtggtctcgaaagtaacaataggattctgcataccgaataactcctttcatagaggtctttcgggaagaaagaccgttcgtaaaattcagtataccatatttaatttgaaattggaagtgattttgctttgaagttgatttcttggaacgtaaacgggttgcgcgcctgcatgacaaagggttttaatgactttttagcggcggaagaccccgatgttatctgcttgcaggaaacgaaaatgcagcgcgagcaggcggattttgattttgcggggtacacggaattctggaactctgccgagaaaaaagggtatgccggcacggcgatctttacaaagacagagccgcttgatgtgacgtatggcatcggcgacgaacagtttgactgcgaggggcgcgtgatctgcgcggaattcccggagttttaccttgtgaccgtgtacacgccgaacgctcaaagagagcttgtgcgcattgattttcgtatggcgtttgaggataagttccgcgcgtatctcgaaaggctgcacgaaacgaagccggttattgtgtgcggcgacatgaatgtggcacacaggcgcatcgacatcaaaaacgcaaagccgaacatcggcagcgcgggattttcgtacgaagaaagagggaagttttccgaactgctcgcggcaggttttgtggattcgttccgcgaattgtaccccgatgcaaaggacgcgtattcctggtggtcgtatatgggcaaggcaagagaaaagaacgtcggctggcgcattgactatttcctcatcacggaggagctgaaaaagaatttggcggacagcaagatcctctccgacgtgatgggcagcgaccattgcccggtggagctcatcttgaattttagcgaggaaaacgcatgatttttaaggagaaaaagacaccgacgcttttgatgatgccttcggcgaacggctggcgcgcggtacacaagaaatataaaaacgaatacggcacggtgatctgcaccgaaaagggtgatacggtggaagtcgtgacggacttcggtgaattttccaccgagcgtacggaagcggtggaaagcgctgcggcgatgatttttgaaaacaacggcgtgaaagagattacggtggacggagagaagcttacccgcgaagcgtggcaggaaaaagaagatgcgcgcctaaatgcgctgcacaggacgcgggaggattacaaaaatgtgctcggaaagcccgtgcactgcgtgacggacaggccgcttggctctgcgcacccgcgctatccggagatgatctaccccgtgaactacggctatgtgccgggcgtgatggcgggggataacgccgagcaggacgtgtacattttgggtccaacggagccgcttaaaacctttgacggtgtggtgatcgcagtggtgcatcgctttaacgacgtggaagacaagtgggtggcggcggaaaagaccggcgtttacacggcggaggaaatcctgaaaattctcgattttcaggaaaaatactacgaaagcgagctgatcctctaaatgaccgaggaactcatgcgcaggctacgggtcatcacgccggaggaacagcgcattttggacggcggcgcggtggacaaggcggcgtacacggcgcgggcggtgtttacggtggacagcgagaagcttttggagcgcgggcggctcatctccgtgcgcgcgcacacgcggtttgcaccgttccccagacacgcgcacagctatattgaaatcatgtacatgtgctccggcaagacggtgcaccgcatcaacggcggcgagcccatcaccgtacatgcgggcgagctgctgtttttggggcgcggcgcttcgcatgagatagaacgtgcggaatatgaggacattgcggtgaatttcattgtgctgcctcagttctttgatacggcgttggagcgcatcggcgcggacaacgcgcttgggcggttcatcgcgaacagcatcagccgcgcggggggctcggattttttactgtttagagttgcggatgtgctgccggtgcagaatctcgttgaaaacctcgtttggacgcttgtgaacgacacgaaaaaccgcagacgcattacgcagaacacgatggcgctgctgtttttggagcttttgaactgcacggataagctggcggcgagcgaaaacgagggcgatcacagcgcacttgtgatgacggcgctgagagagattgaagaaaattaccgcacggcgagcttgacggacattgcggaaaagtacggtgtgacgatttcgtacctcagcgcggcggtacacagcacgacggggttcacgtttaaatcgcttttgcggcgcaagcgaatggagaaagcggcggcactgctttccggcacgaagctttccgtgagcgatattatcatggcggtggggtatgagaacacgagctatttttacagggcgttttcggaaatgtacggcgtgacaccaagggagtatcggttgaggcagagaggttagtacgcataaaataacgccgcacgctcgatgaggaaaacgagggtgcggcgttgctttatttctgagaatttgccgcctttgaaaaggcgggcgaaacttttaactacgcttttcggaagctcggtttacttcacgaatctcaaaacattccacgaggttttcgtgaggttcgctttatagagattgccgtctttttcggttctgtccgtatggagcttcggggtgacggcgctgtgctcggcggtgttgacggccttcatatccgggttttcaaggacgatgtgctctgcgaggcggtaatcgccgaaggagcgcaggtcgaggtcgaggacgatgtcgtccgtcaggctgcggttgacggcgaagacggtaacttcgtccttttcgtcgttccacacggcgatggactcgacgtcggtgacatcggtgaaatcgatggtatcgtgctttgtggaggtgagcaccggctggagcgcaatgccgcggccatatttggaggcgtggagcagcggataataaatcgtctggcaccatgcggggccgttttcttcggtcataatgggtgcgatgacgttgacgagctgtgccatgcacgccatttttacgcggtcggagtgcttcatcagcgtgatgagcatgaggccgacgagcagggcgtcttcaaaatcgtagtggtcttcgagcaggtgcggcgcgatttgccacgggcggttcttcatggtgtcggcatcggtggcatcggcgtggaaccagacgttccattcgtcgaagctgaggttgatgtttttctttgcgcgcttcttcgctttgacgaaatcgcacgtggagatgacggtacggatgaagtgatccatatcgtcgctctgggcgaggaagtttgcggtatcgttgaagcggttgccgtagtactggtgcagggagatgtaatcgacgctgtcatacgcccaagagagcgcggtgttttcccactccgggaatgtgggcatgcccgtgctggagctgccgcagagcacgagctcgatggacgggtcaatctgcttcatggctttggcggtctcatcggcaaggtggccgtattcgtcggcggtcttgtggccggtttgccacgggccgtccatttcgttgccgaggcaccagaccttgatgttgtgcgggtctttgacgccgtgcttgatgcgcaggtcgctgtatttggtgccggacgggtggttgcagtattcgagcaggttgcacgcggcttcaatgccgcgtgtgccgaggttgacggcctgcatgatctgcgtgtcggcttttttcgcccactttgcgaactcgttgatgccgatatagttcggctctgtgctgcgccatgcaagctcaagacgcttcgggcggtcttctacgggacccacgctgtcttcccagtaaaaattggagacgaagttgccgccggggtaacggacgatcggcacttgcagctcgcgcacgaggtcgagtacgtcgcggcggaagccgtcttcatcggcagtggggtggcccggctgccagatgccgccgtatactgcacggccgaggtgctcgatgaacgagccgtagatgcgcttatcgattttagaaatttggaaatccttttcaatggtgagttttgcctgttttgccatagacctgatctctcctcagaagttgtatgtacaatttatgtgttcattttagcttgaaagccttggattgtcaacctatttcggcggaattcttttgctgtgtgccgaaaagtgaagcgcggatttgtgcagtttggcgggagaaaattctgtgcggcagaagaaaagttaaaataaagatagttttaagtgaaaacaacgtccttatttttgaacacgattcctgctatactattgctgtaaacgaaaaaacggagggcttatatgaaaacgtatttggcggtggacattggggcttcaagcgggcggcacattttggggtggctcgaggacggaaaactgaagctgaaagaaatctaccgttttaaaaacggggcggaagaccaaaacggccatttgtgctgggacattgaccgccttgaaagcgaagtgatagacggcattgcggcgtgtgagactgcgcccgagagcgtggcggtggacacgtgggcagtggattatgttttgctcggtaaaaacggagaacgcatctgcccggcggtggcgtaccgcgacagccgcacggagacggtgccggacgagctggaaaaaacggtgccgtttgcgtggctgtacggaagaacgggcattcagatgcagaagttcaacacggtgtatcagctggcggcgcagaaaaaagaaatgccggatgtatttgaaaaggccgaaaagcttttgatgatcccggattatctgacatacaggctttcgggcgtggccgtgaacgaatacacaaatgcgagcacgacggcgatggtctcggcagaacataagacatgggacaaggagatcatagcgcgggtgggtttgccggagaaaatcttcggcgcgctgcacaagccgggtgaagcgctcggcgggctgacggagcgcgtgaaggagaaggtcggctttgatttgacggtgcggcttgcggcttcgcacgacacggcttccgcgtttttggcggtgccggcgaaggatgagaacgcggtgttcctttcgagcggcacgtggagccttattggcgtggagctgaaagcgccggtgacgaacgacgagagccgtgcgcagaattttacgaacgagggcgggtatgagtaccgctatcggtatttgaaaaacatcatgggcctttggatgctgcagaatatgcggcaggagcttggagacgagaacagctttgataagttgacggagcttgcgcagagcgcggcggattataagggccgagtggacgtgaacgcagagtgttttttggcgccgaaaagcatgtgtgcggcggtgaaaaacgagcttatgaagcaaggattcaaagaaccgacggtgccggagatgctctcctgtgtataccacagtctggcggaaagctacgccgagacgataaaggcacttgaaaagctgacgggcaaagtatatacgagtttaaatatcgtcggcggcggcagccgggacgaatatttgaataaactcacggcgaaggcctgcgggctacccgtgtatgcgggcccgacagagggcacggccatcggtaatctcatcgtgcagatgatcgcggacggcgagcttgcgagcgtacagcaggcgcgtgacgtgatacgggacagctttgaaattaaaatttacgaaccctgaaaagtgtattataatagagtaaaaacaaaacggaaaggacgataaaatgctgaaaggtaaaacggttttactgggcgtgacgggcagcattgcggcgtacaaaattgcggggcttgcgagtatgctgaaaaagcagcacgcggatattacggtgctgatgacgcagaacgccacgaattttatcaaccccattacatttgagactttgacgggcaacaagtgcctcattgatacgttcgaccgcaatttccagtacagcgtggagcacgttgcgctggcaaagcgcgcggacattgtgctcatcgcccccgcgagcgcgaatgtcatcggcaaaattgcgaacggcattgcggacgacatgctgacgacgaccgtgatggcgtgccgctgcccgattttgatttcgcctgcgatgaacacgaatatgttcttgaaccccattgtgcaggataatcttgcaaaattgagacgcttcgggtacacggtgatcgagccggacagcgggtatttggcttgcggtgatataggcgcggggaaaatgccatccgaaaagacgctgtttgactggattatgcagacgatcggtgcggagaaagatcttgcggggcagaaaatcctcgtgacggcgggcgcaacggcggagaagatcgaccctgtgcggttcatcacgaaccattcgacgggtaaaatgggctgcgcgtttgcacgccgtgcggcgatgcgcggtgcggacgtgacgctcgtctgcgcgaacatgaccgtggaaccgcctccgtttgtgacggtggtgaaagcggaatctgcggaagatatgttcaacgcggtgacgagccgtgcgccgaagatggacgtcatcatcaaagcggctgcggtggcggattaccgcccgaaaacggtcgccgaggagaaaatcaaaaagcacgacggcggcataaacattgagcttgagcgcacgcaggacattctggcgtacctcggcgcgcacaagcctgcggggcagttcctctgcggctttgcgatggagaccgagaatctcattgaaaacgcgcgtggaaagctcgagcgcaagaacctcgatatgatcgcggcgaacagcctgcgcacgaagggtgcgggctttgcgggcgatacgaacgtggtgacgctgctgacaaaagacgaaacagaggagttgccgatgctctcaaaagacgagacggcagaccgcattttaacaaaaatcaacacgcttaggaaaggatgaacgatatgacacagtatgaggcggcaaaaaagcgctatgccgagcgcggtgtggacgctgacgctgccatcaacacgctgaaaagcgtgccggtctctctgcactgctggcaaggcgacgacgtgcgcggctttgacggcgacccgaatgccccgctgacgggcggcattcagacgacgggcaactaccccggccgtgcgcgcacgccggaggagctgatggcggacatcgacgaggtgctgcgcctttgccccggcacgaagaagctgaatttacacgcgagctacgcgatcttcaccgaagaaaacggcggctgggtggacagagataagctggagccgaagcactttgcgccgtgggtgaagttctgtaaggagcgcgggctgggatgtgactttaacccgacgtatttttcgcacccgaagtgcgacccgctgacgctctcgagcccgaacccggagacgcgcaaattctgggtggagcacggcaaggcgtgtatccgcatttcgcagtatctggcggaggagctcggtcagccgtgcatcatgaacatctggacgggcgacggactgaaagatattcccgccgaccgcatgacgccgcgcatgctgtataaagagtctctcgatgagattctctctgagccgtacgattttaaccttgtaaagccgtgtgtggaatcgaaggtgttcggtatcggtgtggaggcgtacacggtgggcagtgcggaatttgcgctgggctatgcggcgatgaataaagataagtgcatcccactgctcgataacggccactaccacccgacggaggtcgtatccgataaaattccggcgatgctgacgttcttcccggagattgcgctgcacatcacgcgcggcgtgcgctgggacagcgaccacgtggtgctgtttgacgacgagacaaaggagattgcgaaggagatcgtgcgctgcggcgggctttcgggtcgtgttaagattgcgctcgattactttgacgcgtccatcaaccgtatcggcgcgtgggtgacgggcttccgcaatgtacagaaggcgctgttgttcgcgctgttgcagccgacggaggagctgacgaagctgcagaacgagcaggacttcacgtctttgatgatccgcgcggaggagttgaaaacgatgccgttcggcgatgtttgggcggaatactgcaaggagcagaatgtccccgcagacgacatggcgtggctttctgaaattaaaaaatacgaaaacgaagtgcttttaaagcgctgaggaggtatataaaaatgatgacggaaattcccgcagtacgcggttttatccgcatgtgcacggatggctgggagcagggctggcacgagagaaacggcggcaacctgacctaccgcatgaagccggaggaagtggagcagtgccgcccgttcttcaccgcgccgcgcgagtggaacagcatgggcgtgcaggcagataacttaaagggcgaatatttcatcacgacgggcagcggcaagtttttgcgcaatgtgcaggatgacccggagcacaacatcggtattgtagagatcaacgatgcgggcgacagctggcgcattgtgtggggccttgagaacggcgcgcgcccgacgagcgaattcccgagccactttatgaaccacagtgtgcgcaaggcggcgacgagcggcgcttaccgtgtcatttaccacgcgcacacgccgaatctcatcgcgatgacgtacatcatgccgctgacggcgcgcgactttacgcgtgctttatggcagagcgccacggagtgcccggtggtgttccccggcggcgtgggcgtggtgccgtggatggtgccgggcggcgcggacattgcgatggcgacgagcgagctgatgaaaaaatatgacgcggccgtttgggcgcaccacggcttgttcgtttccggaccggattacgacattacgtttggcctcatgcacacgatcgaaaaggcggcgcaaatttatatgcttgctattacggcgggcggcggtaaaattcgccagaccattacagacgacaatttgagagccatcgcgaaggaattcggcgtggaactgaacgaagaatttttgaactgatatttacagttttgttacaaacaaactgtgcggacaggtgtataattaacttagttaaaaaatttccatatttgggattaggagatgttttttatggtcagcagaatcgtattgaacacaatttcttaccacggcaagggtgcgattgaaaagattccggaggagcttcaggcgcgcggctacaaaaaagcttttgtttgctcggacccggaccttttgaagttcggcgttacgcagaaggtaacggatcttctggacaaggccggcttcccgtattccgtttacagcgagatcaagccgaacccgacgattgagaacgtacagcacggcgttgaggccttcaaggtttccggcgcagactgcatcgtgaccattggcggcggctcctccatggataccgcaaaggccatcggcatcatcattgagaacccggagttcgcagacgttcgctctctggagggcgttgcgccgacgaagaagcatgcggtgtttaccattgctgtgccgaccactgccggtaccgctgcggaagtgacaatcaactacgttatcaccgacgtggagaagaagagaaagttcgtctgcgtagacacgaacgacatcccggagatcgcggttgttgacccggatatgatgtcctccatgccgaagggtctgaccgctgcgaccggtatggacgctttgacccacgccattgagggctacatcacgaagggcgcctgcaccatttccgatatgttccatcttgaagccattcgcctgatttccgagaacctgcgcggcgcggtgcagaacaccgaagccggcagagagggcatggcactcggtcagtacattgcaggcatgggcttctcgaatgtcggcctcggcatcgtacactccatggcgcacggtctctccgctctgtatgacactccgcacggcgtggcttgcgccatcattctgccgaccggccttgagtacaacaagtccgttgcaggcgagcgttaccgcgcagtaggcaaggccatgggcgttgagggcattgacgcgatgaccgccgaagaggctgccgatgcaacgattgcggctgtgaagaagctgagtgaagatgtgggtattccgacaaacctgaagggcatcctgaaggaagaggacgtacagttcctcgcagaaagcgcatttgcagatgcttgctgcccgggcaacccgcgcgacacctccgttgaggagattgccgagctgtacagaagcttgatgtaatcgttttttgcctaaggtaaccgaataaacatagagacccccgctttcggagctttccgggagcgggggtcttgtgcgttatgggtttatacggatttttttgcgggaagacgcgcagagagcttttcggtgatgcggcagaacaggcggcggatattttcgatgccgacggctgcaagcacgcagaaaagcggaacgttggtgtataaataacgggcgcgtacttcaaacaggagctcaaagacggtgagaccgatccaagtgagccacaggatatttaaggtttttgcgtgcttatgactgaagctgctgaacagacctgcggcgccaagcagcaagatcatgagccaaatgaattgctcgaaggttgtgaaatacaaatagcggctgccgtcggggtagtagatgctgcggaggaagggagcggcttttgtattgggcggatcaaaaacggtttgaaggaaatttccctcttttccccatgcgaatgtgccgtcattatagagcgtgagcattttttgcgcgagctgtttgagcgtgccgaaaaagcccatttcctgtaaacgctgtttgccgacggcgatatttgcctgcatgcgctcggaagcggtgacaaaagaacgggaatagcgaacgtcttcggcggaatagacaccttttttttccgggttaagacccatcatccagaaatgtgcaatgccgaagctttgctcgttatcaagctgaatgtgatagtgggaacacagaaaacctgtaccggctttaacggcgaaaaaggtgatggcgactgtcaaaagtgagagcagaagcggttttaacagatgcttttcggacagtgcgtaaataccttcaatcaaaaaaacggcgataagcaaaataaaacactgcggcttgataaaatacccgagtgtgccgatgatggcggaaagcacataggagagccatttgtgttttgccggacggatgaatacataaagtgtaaggatagggaaaatcagccctaaagcgtctgtgtagcagatgacgttccacggggaaagcccaaagctgagtaccgcgagaaaaaagccgaaaaaagcgtatagctttcgtgtgagccgcgcggcggttttataaacgagcagacaggaaagcgtattgagtgcgcagttgacggtgatgacgcacaaagcctgctgtgtatcggagaaaatgctgaaatatttattcagcttgaaaacgaacagctcgaagaaaaagtacagcagattattgggatagttggaaaaatagcggatatcgaccgaatgcttgtgcatcagattgcgggcgttttctgtaaggaggcccgcatcccaaccggtttcgaaataaatgttataggaaatatagagctgtgcggaaaataaaagcagacacagacagtatatgagcacatcgggcgatacggtcggccgatgccgcgaaagcttgacctgttgcaggcggttaagggacagaaacagcacaaaaagggcgataccgaacagaagcagagcgatatttgagagcagaaatgtctgctttttggcgtatgtacattgcgtaaaaaacaggagcaatacaaaaacgcagccgaaaacggagccgaggaaaaatttggaagctccgaaaacgaattttttcataaaatgtacctcttaaactcaacatgccgtgagcagcgggaaaagaaatcccgaactgccgagacaattcgggatccggtttggttagcgtatcagtgttcgtccaagacgttttcttccggttcggctttgagatgggtttcgatgagaaaacgggggcgctgcttgacttcgctgtaaattttgccgatgtagccgccgacgacgccgaggcagagcatctgcagaccgccgagcagccagatggacgcgacgatggctgtccagcccgcgacggtgacgccgcacaggtgcgagatgagcgcgtacaggaggccgaagatgctgaggacggagatgagaatgccgaggttggagatgagctttaagggttttacgctgaacgacgtgatgccgtcgagcgcgaaggagatcatcttttttaaggggtatttggattcgcccgcgaaacgctcggcgcggtcgtaatagacatagtcgcttttaaagccgatgagcggcacgatgccgcgcagaaacaggttgacttccttatactcggaaaggccctcgagcgcgcgacggctcatcagacggtaatcggcgtgattgaagacgacgtctacgccgagaatcttcatgaatttataaaagccctctgcggtggtgcgcttgaagaatgtatcggtctcgcgcttgttgcgcacgccgtagacgacgtcgcagccctccatatatttttcgacgaagcggtcgatgacgttaatgtcatcctgcaggtcggcatccatgctgatggcgcagtcgcacagcggcatggcggtcatgaggccggcgagcagggcgttttggtggccgcggttgtgcgcgagctttacgccgtccacatagggaatcgcttcagcatattcggagatgatcgcccaggttttatccttgctgccgtcatcgacatagagaatgcggctttcgggatcgacctgctcggtgcggatcatggtgtgcattttttcggtcagacgcttggtggtctccggcagcacggcttcctcgttgtagcaaggaatgacgaggtacaagaccggaatattacgttcagtcgtcattatcaaaaccttctttcttttccaaagcgcggtcggtttgactgcgcggttttatgtgaataatcccgctgttttcaaaatgcgcgccatgcttttttgcatagtgggagagcgggcgcagcaccatattgtggcgggtgagcggcacggggacttctttgaagatcgtgcgcatgagtaccatataaagtgcgaacagaagcacgcacacgacggtgattgccatgccgaggaacaggccgggcgtgcggtatttgaactcgatcttgacattggtgccggcgttgacgcggatggccatgaagccgacgttcaccttttcgatatcaaccttttcgccgttgacgtaggccgaccagccgttttcatacgggatgctgaagaacacgggcacgtcgcggcttgctgtgatggtggcgttaaagccggtatttgtgtattcaaaggtatcgcaggtgagctttgcacggttttcgcaatctgttttgtaggtttccttggtgtaggagagttcgcttgtatcgagcggagaaagcatatcgccccattttgaaacctgcttatcggtgaggacgatgcccttgagcatcaaaagctcgcggtagctttcgcttgtgttttcgtagtctttttcggtgacatagctgtcgtaggtgaagcccatgggaatgtaatgttcgttttcccaaatgtcaaagccgtttgtgttgccgtagtacatccagcccggcatggcggggtcggcgtagtcttcgccggcgaaatactcggtatcgtgatcgtcgtcaaaaagatacttgacgcttgtcagtccgcgcaggccgtagtgagtggtatccgggcgggaagcgacatcgcgctgcacgccgatggaatcgtagaactccatgagcgagccggggacgatgctgtggaacgcctgaatggactgtacctcccagaacatggcggagttatcgaggctttcgtagaaatccgtacggacgttatcgtcgcgcaggtcgtctatggcgacatccgcgccgccgtttaaggcgtaggggatgatgtggtcataggtgtaatccgactgtgttttgccgagcgcgatgaagaaagcagaatacagcacgatggtgatgctgaggcagacggatgcggcgcggtagaacgggcgggagccgcggttataaaatgcaagaacaaagccgacaagtgcaagtgagaggagcgcaatggcggcgtatgtccagaagcgtgtggggtatttttcgagaccgaatgtgacatcggtaatctcgccgtccgttttggtgagtgtgggtatgaggccgatgacgagcgtcatggcgagcgtgatgagcgttgtccacttcaaggagcggcgccaatcaacacgcgggttttcgagcgccatcatggtggcggcggccatcatgagcgtgagcatatagaaccagcgtgcgtaatacgacgcgttcatgagctggaacaaagcgttgaggccgggaataaacgccatgaagagcagaacgcagagcatctttttcagccagtggcggcgcttcagctgcatccagccgatgacgccggtcatgctgaacatgggcagccatgcaccgagggacgcccatttggattcggaatccggggtgaagttcgggcgtgcgggaagatccggcgggaagaagagacactgcaaaatgtgaatgtagcgctggttgcggtcataaagcagggcgctccagccgctgatgggattggaaacgcggtagttttgaatgatgcacagaacgcttggcacaagcagaatgcacgcgatgccgaggccgagcacggcttcgagcgcgagcaggaggaaatctttgaccgtgatgtgccagctgccggagagcagacgcacaaagaagtagatgaccgtgaatgtcaccatgccgacgaaaaaataataattcacgatgcacgcggcggcgaccatgagcgcaaaaatgccgcggcgctttgtgtacacgtattcatcgagcgcggctaagagcaaagggaacacgatgatggcttcgtgaaaatgattgaagaaaatgttgtagatggagtagcccgagaacgcgtataagagagacgctaagagcgccgtgttggggttctttgcatagcggtgcagatagatatagccagagagggaggcacagccgaactttaagatgaacagcgggcccatgaggtattgcagccattcgcccgggaacggaatggtgagccagaagaacgggctgccgagcaggtagaacgaataggagccgatgaaattgacgccgaggtctgttaaatgattccagccgatgttgccggaacgaatggcatcgtgcgcgatgcggtagaacggcacctgctgcacattgaaatcgccgtagaacagaaagcggccgccgtctacgatcatgaacggcacaaagatgacaaaggccagagcgaggccgaaaaggaaggagaagaggaaataattgccgcgcggcttttgctggatgcgaccatcgcgcacataagattttgaggtatccaagtgaatgtcctcctgtatgtgaatttagaatgaggtttcttgtaagcgtggttaaaagtttttgatcgaccttttttcaaatgaaggtcaaaccgaacctgcggttcggtcgtggggtctcggggggaagcccagagtcgtcgtccgcagacgacgaaaactttttgcctcccaaaaatcaggactgggagaaaccaatgcttcgcattgctatcaaacagtccggtggactgtttttgcgcgggagacccaattagggggtctcccgaaaggcgtgtaacgcctttttaaaagagagattccccgcatctatatttaagcccagtataacacaaataaagggtagattaaaggcaaattctaatttttaaggaatttttattgaaatgtgcggggcagttcggtattataatataagtaaaattaaaaatacagaaaaatcagaaggatataaaaatgaaaatcggaaatctgactttgaacggtgtggcggcgctggctccgatggcgggcgcgaccgatcggccgttccgcgaactttgctgctcgttcggcgcagcgtactgcgtgacggaaatggtctcgacgagagcgctgcagtataactataaaaaaacgcaggagcttatcacgctcggcgaaaaggaacaccccgttgcgatccagatgttcggcgacgacccgctcatctttgcatctgccgcaaagcgcgccgcagcggccgggccggatgttattgatatcaatatgggttgccctgtgccgaaaattgcgggcaataactgcggcagcgccctcatgaaaaagccgccgctgtgtggggacattgtccgtgccgtgaaaaatgcggtcgacctgcccgtgacggtgaaaattcgtaagggctgggacgaaaacagcgtgaacgcagtggaggtcgcaaaatattgcgaagatgcgggcgtggacgccatttgcgtgcacggcagaacgcgcacacagatgtatgagccgccggcggactgggatattatccgtcaggtgaaagaagccgtgaaggtgcccgtcatcggcaacggcgacgtaaaatgcgtgcaggacgccgtgcgcatgatgaacgagaccgggtgcgacatggtgatgatcgggcgcggggcgctcggcaatccatggatcttcagggagatcaacggctatttcagcagcggtctgcgcattatgccgccgccgacgcttgcggagcgcattgtggtcattaaaaagcatatggatgcgctgtgcgccgcaaagggagaggggcgcggcatgcgcgaagcgagaaagcatgtggcgtggtacatgcacggtctgcgcggtgcggcggaattccggcgcatggcgggcgagctggaaacgctcagcgacctcgataaattgctcgagaaagtgtatatagaaaacaaagacgtgtcttttgacccgtaacggaaaggaagatcagcgtgaagcttttggtactggacggcaacagcattttaaaccgcgcgttttacggcattaagctgctgacaacgaaaagcggcgagtttacaaacggtattgtcggatttttgaatattctggaaaaagtgaaggacgaaacggagccggacgcggtggccatcgcattcgatatgaaagcgccgacattccgccacaaggcctatgcgggttataaggcgcagcgcaagggcatgccgccggagcttgcggcgcagatgccggtcttaaaggaactgctcggcgacctcggctataaaatcgtgacgtgcgagggctgggaagcagacgatattctcggcacgtttgcggaaacgtgcgaaaacacggacaatacgtgcatgattgcgaccggcgaccgggacagcctgcagcttgtctcgccgaaaacgacggtgcgccttgcaacgacgaaattcggtcagtctgccgtgacgctgtgtgatgaggcgtatatcaaagagacgtacggcgtggaaccgaagcagctcatcgacatcaaggccattcagggcgatacctcggataatattccgggcgttgcgggcatcggcgaaaagggtgcgggcgagctgatccgcaagttcggctctttgcagtatatttacgacaatttagatgagctggacatcaagcccggcatgagaacgaagctgatcaattccaaagacaacgcgtttttgagctacgacctcggtaccatccgccgcaatgcgccgatcgatacggagcttgcgcattatattccaggcgagggtgaccccgcagccgcggcgcagattatgacgcgtttagagctctttaagctgatggaacgcctgcacctgactcccggcgcggcgccgacggcgaacagcgcacaggccgaagaagcggctttgttgcccgtgaagaattataaagacggcgcagcggtgctcggccagtgtgaggacgagggggcggcgtactttgtgccggtgtttgaaaacgacgaattaaagcagcttgtgtttaacggtaagttcgacgcgggcaagccggcgattgcggttgtggatgcggacgacgcgtttttgaaggcgttcctcggcagtaaggtgacgaaaaagtacacgtttgcgctgaaaaagctgcaccgcacggcgctgcatttgaggacttcccttgaaaacgccgtgatggacacggagcttgcggcgtatcttttgaacccctcgggctccgattacggtgtgctgcgtttggcggcggaatggggcattgccgtgcccgcatatgaggacgcgaacgtgcaggcggcggctgtgctgcccgctgtttgtgcggcgctgcaaaagggcatcgacgaaaacggccagcacgaattattgaagaacattgaaattccgcttgctttggttttgggcgagatggaggaaagcggcttccttgttgaccgcgaggccataaaaacctacggcgaggtgctttctgagcaggtagacgcgctgcagaaagaaatttatgaagacgtggggtacgaattcaacatcaactccccggtgcagctgggcgaagcgctgttcgtaaagctcggactgccgcacggcaaaaagacgaaaaagggatactccacaaatgcagatgtgctggagggtctgcgcggcgtgcatccggcagtcgataaggttttgcgctaccgcacgctgacgaagctgcgttccacgtactgcgagggcttgctgaaagccatcacggcggacgggcgcattcactcgagcttcaaccagaccgaaacgcgcacggggcgtatttcctcgactgagccgaatttgcagaacattccggtgcgcacgccgcttgggcgtgaattccgccggttcttcatcgcaaaagaggggaatgtgcttgtggacgccgactattcgcagattgaactgcgcgtattggcgcacgtggcaaacgacacgcagatgcaggaggacttccgacttgggcgcgacatccacaccatgacggcggcgcgtgtgttcgatatgcccgaagatcttgtgaccccgcagatgcgcagccgtgcgaaagcggtcaacttcggcattgtgtacggcatcggtgcgttctcgctttcgaaagacatcggtgtttcccgccgcgaggccgaggactatattcacgattacctgcgcaattataagggcgttgcagactatatggagcgcgtggtggaggaagcgaagaaaaacggctatgtggagacgctgttcggccgcagacgctatctgccggagcttgcaagctccaatttcaatatgcgtgcgttcggtgaacgtgtggcgcgcaacatgccgattcagggcacggcggcggacatcatcaagattgcgatggtgcacgtgcgcaaccgtttgaaagccgaaaagctcgatgcaaagctgattttgcaggtgcatgacgaactcattgtggagtgcccggaagcggaaagcgacacggtgaagaaaattctggaagaagaaatggcaaacgcggtgcagctgagcgtgccgatgctggcagaggccggaagcggtaagagctggtatcaggcgaagggctgagggtttatgatgatattttgctgtcccgcatgcggcagcgcgttggaaagagaagaccgcgcgctgcgctgcgcaaacggacattcttatgatattgcgcgccaggggtatgtgcatcttctgcccgtaaagcagatgcacgcgaagattcccggcgacacaaagcagatggtggacgcgcgccgcgtgtttttgagcggcggctactacgatgcattccgtgacaaactggcggagctgacggacaaatatctgcccgagaacggcgttgttttggacgcaggctgcggcgagggcttttacacttcggctttatatgaaaaagccaaagcgaaaaacggttcggtttccggcgtggacatctcgaaattcgcggtgaaagcggctgcgggcaaatataagggcatcgatttcgcggtggcgagtttatttcacctgccgtgtgcggaaaacagtgcagatgtgctgacggacgtttttgcgcctattgtgccggaggagttttttagggtattaaagccgggcggcgtaatgatccttgcagtgccgggtgcgcggcatctgtacggcatgaaagaggttttatacaaagagccgtatgagaacgaagagcacgacacggcctacgacgggtttgaatacctcggccgtgcgtgtgtgcaaaagtttatcacggtaaacgggcgggagaacattgaagcgctgttctccatgacgccgtactactggaagacggacgtagagggcggagagcgtctgcgcgcgctcgatgtgctcgagaccgagattaaatttgactttctggtttacaggaagaagtaggcgggtgcgcctttcagcagctttgtgcggcacaatgttgtttattattgttgttttgttgtcattcattgaaaattaaagaatacttagtagaattctctcccgaactgtgctatgataggtagcggtcgttcgggagcgttttcattttggaagacgaaatacgaccgattatagaagtattcgaggtttataatcaaagatgaaaattttgtttgtctgcaccggcaacacgtgcagaagcccaatggcggagggcattttccgccgcgaaatggagcagcgcggctttgagaacatcatgtgccaaagcgccggtctttccgcgctcgatgggcagcaccccagcgaaaatgcggtgctggcctgcaaggagatcggcgtggacatcagcggtcacattgcgcgccgctttacgccggaagaaatcgatgtgtgggacgtttatttcacgatgtcgaaaacccacgcgtacattttgatgcaggcgggtgtgccggcggagaaaatttacgtgccgcattacattgacgatccctacggcggggacctaaatacctaccgcaagtgccgcgacaagatctgcgaggaattgcagacgtttgagcagcatctcggtttttaaggagcgtttatgcagattgtttcgatgacggcggagcacgtttcgcgccttgcggagcttgaaaagctttgcttttcggaaccgtggagcgaaaagagcctgacggaggagattgataatcctgctgcgtgctttttggtggcgatgcagcaagatgaggtgctcggctacggcggcatgcacacggtgctcggcgaaagctatgtggacaacattgcggtgttcccggagtttcgcggccatggtgtgggcagaacgctcatggcggcgctgatcgaaaaagcgcgggaaaacggcggcgttttcatcacgctggaggtgcggacatcaaacctgccggccattgcgatgtaccgttcgctcggctttacggaagcgggcgtgcgccgcaatttttatacagaaccaagagaggatgcgctgatttttacgctctctttctgaatttttagctatacgggggtaaaaagtatgcttttcggaaaaatcaaggcgcttgtcgaatacggcgtgcgcacggggctcatcgaagcggaagacacgatttacacgcgcaaccgtttattggaggcgctttgtgaagaggattacgcggatgaggaagcggagcagagcgaaaacctggcacttttgctggacggcctttgcgacgaagccgtaaagcgcggcatcatcgaggacggtgcgacgtcccgcgatctatttgacacgaaactgatgggccttttgacaccgcgcccgtccgatgtgaaccgcacatttcgcgcactttacaaggaatccccggaaaaggcgacggactggttctataagctttgcggcgactgcaattatatccgccgcgaccgtgtggcgcgcgatttaaagtgggtgtataacgacccgcgtttcggtgcgattgatattaccatcaacctttcaaagccggaaaaagatccgaaggccattgctgcggcaaagaaaatgaaggcttccggttatcctgcctgtatgctgtgcaaggagaatatcggttatgcgggccgcatgaaccacccggcaagacagaaccaccgcgcgatcccgatcacggtgaaccatgcggattggtttttgcagtattctccgtatgtgtactacaatgagcactgcattgtgttctgcggcgagcatgtgccgatgcagattgacaagagcacgttccgcaagctgtttgattttgtggagcagtttccgcactatttcctcggctctaatgccgatttgcccatcgttggcggttccattttgacacacgaccactaccagggcggccactatacgttcgcgatggcgcgcgcgaacatggaggagcactgcacgctgcacggctttgaagatgtggaagcgggcatattgaactggccggtatctgttttgcgtttgcgccataaaaacccggatcgcctgattgacgcggccgaccacgtgttgaaagcgtggagaagctacacggacgaggacgcgttcatttttgcggagacggacagcgagccgcacaacaccatcacgccgattgcgcgctgtgtggacggcgtatacgagctcgaccttgcgctgcgcaacaacatcacgacggaaaagtatccgctcggcgtgtaccacccgcacgacgaatatcatcacatcaagaaagagaacatcggcctcattgaagttatgggtctcgcggttttgccgtccagactgaaagacgagctgaagaccctgaaagatgtgatgctgaaaaacggcgacgtttcaagcgtggagagcatcgcaaagcacgcggggtgggcagcgcaggtgaagcgcgaccacccggaaatgaacgaagcgaatgccgagcacatcttgcagcaggaagtgggaaaggtgtttgtaaaggtgctggagaacgcaggcgtctacaaatgcacggcagagggcagaaaagcgttcagaacgtttgtagaaagcgtacgctgaatcgaaaataatacgataaaataaggaatccaccgtatgtgtgaaagcgatacggtggattccttttaattcgtgatgaaacagcttcaaatttctttgccgcagtatggacggattgcgtttacgtgtcctttaccgtgtctttcagcggttcgcttttcgtgccgtcttcgttgaccttctgcatgttcgggtagacgagcgcgaggtagttgtcatccaagtgcttatcgagaaacatttggaacgagcttgtggcggggatgccctcggcgcgctcgttggcgcgggtcagcgcggcgcaggagatgagcccgtcaaacagcatgaacgcaacgagcaaaatggtgaggatagcgcccgggcgcttcggaattttttcgatcatgcgcgacatggcggggtaaatttctttgatccagataaggccgagcgtgccccagatgagcgcgaacatcaagtttgtgcggccgtcaatgttgaacggcgtgccgctgtaatcccacgaaacggtgccgaacagcatctcctgtccccaactgcacaggtactcgaacgccgcaccgatgatgccgctggcaacaaaaatgacgatgtcgtcctgcttgtagagcttatacaggcacagcgtgatgatggctgcgccgccgccgtaaatgggctggaatgggccgtacacaaggcctacacgcagctcaatctggtgcgcgatgaagaatgcccagcattcttcaagcacaaaaccggcaaggcagccgatgaagaagatccagaagagttttgtgaagttcatgccgaacgcgaacgggcggtcttccgggttttcgaatgtagcttcatattcatagcgattgcgcttccagcgttcggcggagcgctttttgcgctcttccgtcgtgatgcggtacgcttttaattccttttcgtactgctcgttcgtcatatccggcgaggcgttcatgaagcggcgctttaagaagttcgacttgttgaggagtgccgtgtagttttcgtcggcggtcttctgtgcttcctgaagcttcttttgcaggtcgaggtcatcgatggcctccgctgcgccgatggcgccgccggtgacggcattgccgagggcatttctcgcctcgcgcacgcggtctccgagttcagataagcgtttaaactggtgattcaagcgctgcacggtgatggacgtgatgatgatgtcgagcagcatgatgccgaggacggcatagaggatgacccagccgacggtgcggttgacgtagtgcagaagtgacgtgagtaccggcacgatgaacaccacaatgaacgagaagcacacgccgcgcacggtggcgacgggcacggaaacgtaacccttgatattccacttgaatttggagtaatcacgcaggcggatgtgcgttgttttgcgcagcagccacgcgaacgtgaattccacaaggaagcttgaaatcaggcagaaaaacagcgtggcaacaaacgacgtctgccaatgcagcgccgtcaatgccgcccacggcagcgcaatcatcaggccgtactgcgggcagtacgggccgttcagcatgccggggtttttgaattttcggtataccatgccgatgtaccccacctctgcgacccagccgcagaaggaagcaagcacaaagtaccacagaaaaagccagatcttatatgccatgcgtgcatctccttaaaccatcgagcgtcctatgtatatctcggaaaagtataaaacagtatagcatatttcacggttttcaacaatacttctgcaagaaaaaactgtcggaaaccgcagcaatatcggaaattttgaggggaaaacaaacggctcctaccacgaaaacctgcccatactgcctgatggatgacgtgaagatcggcgcgacgaaatgcccgcactgcgcatccgtgcttccgtcggaagacgaagaggaaaaaaggacgcataatatctcgcttatacatacgcggctccacggtgctttcatgcgccgggagccgtttttctttttattgtccgaaggactatagcattcgccgacaggcgaatataattaaggcgcactttcggagagaaagtacgccttgaaaatatgtattcttatgtcttgcttaaagcaaaattaccagccgaggcccttgaggtaatcgcggctcatcttcacggcttcgagagcgggggtgtcataagactgatcctgctcgacaacgacccacttggagccggcttccagtgctgcatcgagcaccggcggaatgttctgcatgccgtggccgaccggacggaactcgaacttgccggtttcttccttcttctcggtctcaatgccgatgagctcgtacatgttggccggcttaccttccttgtagaagtccttgaggtggacgaccggtgcgcggccggcgtacttcttgatgtaatcgaccggctcttcaccggcgaccttgacccagcagatatcaagctcggtctggagcaggtcagcgggaatctcggtatagatataatcgagtgcatactgaccgttcggcatctttacaaactcgaaatcgtggttgtggtaaagcagcgtgatgccgactttcttgcaggcttcgccgatcttcttgaaggtctcaatgttcttgaggaacttctcggtgcccggacgatcttcttccatcagatacgggatggcaatgtactgcatgccgatctccttgtactgtgcgaccgtgccttcgatgtcggcttcgagctcctggaacggaacgtgtgcggaaagcggaacgaggcccacttcttccaaaatcgccttgacttccgccggcttcatgccataaaggcctgcaagctcaacgccgtcatagcccatgcccttgattttctgcatggtgcccttaaaatcgcgctcagcgtcatcgcggacagaataaacctgtaccgctacgggtaaagttttcatggtgaactcctcctaaattaatggattgcttttctttatcatacagtcttttttgtgaaaaatcaatccgtgattatgaaaaattcctaaatattcgcaatttcagagccgaaacaattcaaaacggcgttatcttgcagttcatcttgcagttcacgtctaaaagtagtataatcatgcgtatcgataaacggaaaattcaaatttaaggaatgaagaaaatgaaacgaaatttacgcttttattttgcgctgatgttcgcccgcggtacggcgctagttttaaagctcatcgggcgaaagggcacgtccatgccggggtcttgggctattattctgtgcccggattttatcgggcgcatgccgaaaccgaagaagatcatcggcattacgggcacgaacggcaaaacgactgtctcgaacatgattgaggatgttttggaggataacggtatcgagttcatgtgcaaccgctccggcacgaatgtcgcgaccggcgtggcatctacgctcattgcgaacagtcactttttcggcaagccgaagtgtgaccttgcggtgtttgagctcgatgagcgctctgcgccgaacatttacccctacatgcagccggacattgtgctgtgcacgaacattttccgtgattcttataagcgcaacgcgcacgcggagtttatcctcgatattctgaataaggaaattccaaagggcacaaagctcgttttgaacggcgacgacccgctttgcagttccattaagcccgaaaacgaccgcgtgtatttcggcatcgaccaccttgacacggacaaaaaggaatgcgacaatatcgtaaatgatgtgcctgcctgccccaagtgccacggcccgcttgtgcacgacattgtgcgctaccatcatatcggccgtgtgcactgcgaagcctgcggctaccgctcgccggacatcgactaccttgcaacggacatcgatacgaaagacatgaaaatgaacgtggcggagggcggcaaaaaatcggaatacccgcttttgaacagtacgaacatcaatatttataacgcccttgccgccattgcgacgttgcgtgaattcggcctttccgaagaaaaaatccgcaattccatggagaaaatgggcatcagcgagacgcgttactccgaaaaagaagtgaacggcagaaagtacattctgcaccttgcaaaggggcagaaccccattgcgtgctcccgtgcgtttgaaaatatccgtaacgcgccgggcaaaaagtccgttgtgatgtttctcgacgactacttcgatgcgcgccacaccgtggagaacaccgcgtggttctacgacaccgattttgagtttttaaatgaccctagcatcgtgcaggtcgtcattgccggtgcgcgccaccacgatacgtatgtgcgcacgcttctggccggtgtgccggcggagaagatcgtgcacatgcgcgatgaaagcgatacgactgcggcggtctcgaaagaagcggacacagtctttattctgtacgacgtatacaccattcgtttggcaaatgacattcgcgataagatgatcgaacgtgagaaggagggcgagacgaaatgaaaatagaagtccttttcccggaattctgcaacctgttcggcgacgcgtacaacatggtctaccttgaaaaaacgctgccggaagcggagtttatccgcacgaaattcagcgacgatgtgcgctttaccgaagaaaaaatgaaccttgtgtatatgggtcccatgacggagcgtatgcaggagcaggtcatccgcaagttgatgccgctgaaggagaaaatccaaaaagccattgacgacggcacggtgttccttttcacgggcaatgcgctcgaaatcttcggcgattacattgaaaacgaggacggcagccgcgtagagtgccttgggctttatcgtttgtacgcaaagcgcgatatgatgcaccgccacaacagcgactttgagggcgaatttgacggcaatgtcatcatgggctttaagacgcagttcacgatggcctacacgccggatgaatcgcacggcttgttcgtgaaaaacaaaggtgtggggctcaatataaaggcgaaatacgagggtatccgcgtaaacaacttcttcggcacataccttgtggggccgatcttggttttgaatccgccgtttacaaagttcattttgaacctgataggcgcgggcgatgtgaagcttgcgtttgaagcggaaaacatggcggcctacgaacaacgcaagaaggattttgccgagaaggtacactgatggtgcagcacgaaattccgccggtgttcgacgaaaacagccgcgtgctcgtcttgggctcgtttccgtctgtgcagtcgagaaaagcggcgtttttctacgggcacccgcaaaaccgcttttggcgcgtcttgagcgcggtttttggtgaaccggtgccgggggatatccccgaaaagaaggcgcttttgctaaagcataaagttgccttgtgggacgtcattgcctcgtgcgacgtaacgggctcggctgacgcgagcatcaaaaacgttgtgccgaatgatctttccgtgattttatcgacagcgaacatcacgcatgtgtgtacaaacggtcaaatggcgcacaagctgtatcaaaaatatctggcaaaagagatcgacctgccggaaacggttctgccgagcaccagccccgcgaacgccgcgtggagcttggagcggctgacggaagcgtggaagattatccgatcaatttaatacggcaagcacgcggttttaaaaaccgcgtgcttttttcacccattttttccctctccatataataaagtcaggagggctgaaaatgaatgatattgtattttatgcgttgttggcgacgctggggacatggttcgtcacggcgcttggtgctgccacggtggtgctgtttaaatcgccgaaccctaaaattctcaatttgatgctcggtttcgccgccggggtgatggttgcggcgagcttttggtcacttttgcagccggccatcgagcgcgcggaggcggcgggaagtatgcctgcgtttttggtggcgacactcgggtttctctgcggtgcgttgttcatgtggggctccgataaatgcgtgacctacgcgcagcggcgctccgctttggcgcagggcgagaaaaacgcacggctgaaccgcatcattttgttggtgctttccatcacgctgcacaatatcccggaggggctcgctgtgggcgtggcgttcggtgcgctgaaaaacggcggctatacgccggaagcgctgatgggtgccgtgacggtggccgtgggcatcggtttgcagaatttccccgaaggcgcggcggtctcgctgcctttgcgccgtgaggggtgctccagaaggaagagctttttcatcgggcaggcttccggctttgtggagccaattgcgggcgttttgggcgctttgcttgccgtgtacattgaagccgttttgccgtttgcgctgtcctttgcggcgggcgcgatgatcttagtcgcggtgcacgagctcatccccgagtgtcagcgcaaccaggaagcgcagccgtatgcggcgacaatgggcattgtgacgggctttgcgctaatgatgcttttggacgtgatgctgggatgaaattttaagatagaataaaaagtccgaaacacggtttaggtgcttcggacttttgccgttttgttgtattttatgcctttgcgggttctgcggcggggacggtgagcagctttttccagcggccgctgtaatagtagatgagcagcgggatgatgcccaaaatgtagccgatcggcgcggcaaaccaaatacctgtggtgccgatccagatgggcagaagcaacgagagaccgatcttgctgcacagctccacaacggaggagaccatggaaatgttgattttgcccatgcccttgacggtgctgttataaagccagatccatccgaggaacgggaagaaccacgcctgaatgcggatgaattcgagtgaatacgcgatgacttcggtctcattcggcttgacgtacagcgagacgagcggctcagaaaaaatgagtgtcagcgcacctgcaaaaatgctcagaccgccgacaagaaggaagatttgccgcacgccaagcttgatgcgctctgcgtttttcgcgccgaagttctgcccaacatagacggaaaagccgaatgagaaattgctgaacagcatcacggcgaggttctgcacgttgctgccgacggtgaacgccgcgacgacgttagagccgtagctgttgatgacgcgcgtaatgaccatcatgccgacggaaagaaacaggctttgcagagccatttgcgcacccatgccgaatattttaaggctaacgggcatatccgggcgcagggtgtggcgcttcggcatcagatcggggtatttgcggaacatgacgaggatacagatggcggcggagatggcctgcgagccgatcgttgcaacggcgacacccgcaacgcccatgttgagaccaatgacgctgatgaggtcgaggataacattcaaaatggagcacagaatgaggaaatacagcggtgttttgctgtcgccgagtgcgcgcaggatagatgccgcggcgttatacgcaaactgtgcgatgccgcagccgcagacaatctgaatgtataaaacggacatgtcgatgacgtcttccggcgtttttaaaagctgcatgagcggccgcgcggcgaaaacgctgatgagacccagaacaacgccgagcaaaagggtgatccacccggaggcgacgatgcccttgcgcacgcggtcggtgtcgtttgcgccgacgtattgcgaaagcacgatggaaatggcactcgtcacgccggttgcaagcagcaggatgaggcccgttgtggacgtggtggcaccgatggcggccagcgcgtgcgagccgacgaagcggccgagcacggcggagtccaccatggaataaagcgactggaaaatactgccgatcatcatgggcagcgcaaaacgaagcatcaggttgatcggtttgccctgcgtcatgtcgatggcaccggacggtttggacatgatacaacaactccttaaaaaataagattaaggtaaaccgttccgtagaaaataagggtaaaccgcgtttgtagaacctcttcgctgcgtgttagtttacaagtatcattgtaccaagaaagcaacgcgagttcaatgaacggtttacccaaatcaacggaaaaaatatttggctatttttgccaataattaaatgttaaacgatggaataggtgaacatttcgtagtgcagcgcggtgccgatgtcgatctcctccggtaaaagcgcgcgagcgaccagaatttcatcgtgcgtgtcattgtccgttcggcgcaaaacggcgtagtcgccgtcgatgcttgccacttcgtattcgtaggggcccattataccaccgtaccttttttaacaaatgtggcggcgtgctcacgcgcggcctcgtagtcctgcgctaaaatgaggtaggctttcgtgaaacgctttgcgttcgggtcttccggctcaatggcacgctccattaaaagaacaccgtctgtttcggagacctcgtgaaaacccatctttttgtggaatgccacggcggcatcgttcggcagattgatgtgcgctgtaacgcggcggtaatttgcatagtgcatgatgtccagcatcaggctgtataaagacgtgcccacgccgctgtgcagacatttttcggagacgtacagctgtgcgtcggcagagaacaggtcgtctttcggaatatcgcggtcggtcaaaaagcagaatcccgccgtctggttgttgatctccgtcagaatccacatacggccgtatgtataggtgtcgatgcgctgcacgtactcggcgagcgtcggcacttcggtgtcaggcgtgtagtgcgtcttttcgacgtagggtgtgtaaattttgagcatggacgggccgtcccactcgttcgttctgcgtactgcaactctgaaatcactcatattttcagttcctttcgcttgtaacttctgcatataggggaatagacggtgcggcaccggggcgcgagaccgcaatggcagcggcttttgccgcgaggatcagcgattttttcggcgaaagcccatccagcataccgcgcatgaaatagcccgtgaacgtatcgccggccgcggtggtatcgaccgcacggacaagctccgccggggcaaacgcgcgcttatcttctttggcgtaccacgcgcctttactgccgagcgttaagactgcggcggcgtgcgggtatttttgaaggagcttatccaaaatagcggtgggaatttttgtgccggtcagctgttcgccctccacttcgttcaaaacgaatacggaaacgagcgacagattgcactttaaaacgttttcgttcatcggggacggattgagccagatctccatgccgcgcgcatgggctttttcaagaatatacggcagcgcgctgatctcgttttgcagcagaagaatgtcgcctgcgtcgaattgcgcaagcacgcggtcggcatatgcttcatccacagccccgttggagccgccaaaaagcagaatggcgttctgtgcctctcggctgacctgaatgacggtgtgcccgcccggcatatcgcgcgtttcgatgagggaggtatctacgccgttttggttcaataaatcgcgcaggtgctcgccatccgtgccgatgagccccgcatggcagacggaaagccccgcccgcacaagcgcaatggactggtttaaccccttgccgcccgggaacacggtgcggctttcgctttgaatggtctcaccgccctgcaaaatgtggtcgaccttataaacatagtctgtattgagtgagccgaaattcaagatcctcttcaaggttttgcactcctctgtttcaaaatcaatacaagaatagcacgaacgaagcccgccgtcaaggaaagcaggacaaaagaaaaaacgcaaaaacccaatatttcagcggtttcgccaaggcggaacatattcacaaaacgcgcgaaaagtggtataatatttcggttagcgagcaaaccgagtttttaatccgttttttgccgtatcccgcgcatgcaaaacggcgcggccggttttgaattttttgaagcagtttgaagttaagaacgataaagaaagggattgataaagatgggaaaaagagaaaatttgcgcaacgtagccattattgcacacgttgaccacggcaagaccacccttgtggaccagcttctgcgccagagcggcgttttccgcagcaacgaagccgtaaccgagcgcgtcatggactccggtgatttggagcgtgagcgcggcattacgatcctctccaaaaatacagctgtcatgtacaatgacatcaaaatcaatattgtcgataccccgggccatgccgatttcggcggtgaggtggaacgtattctgatgatggtagacggcgttctgctgcttgtcgatgcgtttgagggatgtatgccgcagacgcgcttcgttttaaagaaggcgcttggtcttggcaaaaagccggtcgttgtcgtcaataaggtcgaccgtccgggcgcacgtccgcttgaagtcgtggacgaagtgcttgacctcttcattgagctcggtgcagacgaagaccagctcgatttcccggtggtctacgcttccgcacgtgacggctacgccatgaaccagccggacgaaaagggcacggacatgaagccgctgtttgaagccattataaacgatgttccggcgccggagggtgaccttgacggcccgacgcaggtgctgttctccaacattgactatgatgagtacgtcggccgtatcggtatcggccgtgtggagcgcggctccgtaaaggtcggccagaccgttaccatctgcaacagcacaagcgacgaaaagcgcaacgcgcgcattacgaagctctaccagtttgagggcctcaagcgcgtggacgcagagagtgcagagcttggcgacatcgtggccgtttccggcatggcagacctcaacatcggtgagaccgcctgcgacccggagcacgtggagccgctgccgttcgtcaagatcgacgagccgaccgtttctatgatgttcatggtcaacaattccccgtttgcgggccgcgagggcaaatatgtcacctcccgcaacctgcgcgaccgcctgtttaaggaggtcgaaacgaacgttgctatgcgcgtggaagagacggattccgccgatacgtttaaggtatccggccgcggcgagctgcacctctccattcttatcgagcagatgcgtcgccagaactacgaattccaggtctcccgcccgagcgttattttcaaggaagaaaacggcaagaagctggagccgatggaacttttgatgatcgaagttccggataactacgtcggcgcggtcatggaaaagctcggcaccagaaaggcagagctgctcaacatgggtacccgcgacagcggcaccacacaccttgaattcaagatcccgtcccgcggcatcatgggctaccgctccgagttccttacggacacgaacggcaacggcatcatgaaccacgtgttcgattgctacgagccgtataagggagacattcagcagcgcagcaccggttctctcgttgtacacgagaccggcgagtccacggcttacggcctgttctacgcacaggacagaggccgcctgtttatcgggccgggcgtaccggtttacgagggcatgattgtcggcagcaacccgaagggcgacgacatcgtcatcaacgtctgcaagaagaagcacgcgacaaacacccgtgcttccggctccgacgacgcactgaaactgaccccgcacaccgtgctctctctggagcagtccctcgagttcatcgcggacgacgagcttgtggagatcacgccgaagagcatccgcatgcgcaaaatggtgctgagcaaagagctgcgcatgaagcaggctgcgaaaaagaagtaatttataaacctgaccaacggaaaagacacacggagagccaatgaatatcgttattttggatctggagtggaacggtgcgtacagccgccgtctccacggctttatcaatgagattatcgagttcggcgctgtcaagctcgatgcacaactgaatatcacagaccggttttcctgctttgtcaaaccgcaggtgacaaaaaagatcagcgcgattatctcggacctcaccaacattacggatgcgaatcttttggacgcacgcccgtacatgcaggtgatgagccgcttcaaaaaatgggcgggcgactgcgtgattgccacgtggggcacgtcggacattctggcgctgattgaaaactgccgctatttcggcggcggggagaccgttccgtttttgcagcgctatgtcgatttacagcagtacgtggaaaagcgccttggcgaggacggcaaggagcagcttgggctttccaaagcggcagaactgctttccattgatgacggtgcgcttgaccaccaccgcgcgctcgacgacagcgtgctgtccgccatggtgctggagcgcatttacacaaaggatacgttccgtccgttcattcaggactgcaaggacccggagttttacagacgcatcacgtttaaaacgacgtatatctgtgacgtgaacagcccgttgatcgaaaaggagcatctgcatttcacgtgcgaaaaatgcggcggcgaagcaaagcgccgcggcaaatggactgtgaaaaacaagagtctgcgcagcacatttaagtgcgaaaagtgcggctacgaattctgcggtcagctgcgcgtgaagcagaagtatgagggtattatcgtgagccgtaaatccattccgctgccgaaaatcgaaaagccgcgccgcgccgaaaacgcagacatcgccgatatgcgtctgacaatcaaggaaaacggtgtgggactgctgacgtttaaggcgtgggagaatatcccgtaccttacgcactgcttctccacgcgcatcggcggcgtgagtgaagaagagtttgccgctatgaacctcggcttcaaccgcggcgacagcgacgaaaatgtaaaagaaaatttccgtctcatcgctcaagcggcgaatatccctgtagagaatataacggcgggcgcgcaggatcaccacacgaacgtgcgccgtgtcacgatgaagaacgccggcacaggtatttggaagccgaaggacatggaaagcgtggacggccttgtgacggatgagccgaatctgccgctgctcatttacgcggcggactgtgtgccgctttacttctacgaccccattcatcacgccattgggctttcgcacgccggttggcgcggcacggtgaacggcatggcaaaagctaccgtagagaaaatgcaggaggaattcgatacccgccccgaggatctgctcgcggccatcggtccgtccattgcaaaggagtgctttgaggtggacgccccgtgtgcggaagaattcctcgcgctgcccgacagcgacaaattcgtcacggacgacggcaacggcaaattccacgttgatctttgggcgtgcaaccgtgcgttcttattaggtgcaggcgtgctgcccgagcacatcacaacgggcggcgtgtgcaccatgtgcaacagcgacctgctgttttcacaccgcgtgacgcgcggcaagcgcggctctaacgccgggttcctgatgctcagggaacaaaacgcatgagcgtttgcacactgtgcccgcgaaaatgcggtgttgaccgtgaaataatgcgcggctactgccaaagcggcggcaaaatgcacattgcgcgcgcgaagctccactactgggaggagccgcccatcagcggtacgcgcggcagtggcacgatcttttttaccggctgctcgctgcgctgcgcgttttgccagaacagcgagatctccggcgaaagcctacacggcaaggattttacggttgaagaattcatcgagacgataaaaaaactcgaagctatgggtgcgcacaacatcaaccttgttacgccgacgcactttgcatcgcaaattgccgaagcgctgcgcgtctataagccgcgtgtgcccgttgtctacaactgcggcgggtatgaatcggtcgagacactgcgcatgttagaggggctcgtcgacatttacctgccggatttcaaatatgcggacgacgatctcgccgtgcggctttccaatgcgccgcactactgtgaaacggcgcttgctgccattcatgagatggtgcgacagacgggcgaaaatgtgtacgacgaaaacggcatgctgcaaaagggcatcatcattcggcagctcattttgcccggccacacgcgcaattccatgcaggcgctggagctcatcaaacagcattttccgggcgtgcccgtgagcctgatgagccaatatacgccgatgggacgtgttttgcacgagccggaatttgcggacatcaaccgtcgcatcaccctgcgggagagccgcaaggtacaaaattatatgttggaactgggtttgcccggcttctgccaaaagcgcagcgccgccggcgaacgttatataccggattttacacagtttgacacggtcaacttaggggaggaaaaatccatgcagacaacgatccagcttctttcaccgatggaaaaagtcatggcgcaggaagaaaagacctttgcgccgtacccgaaggcgagcgctctgcgcggagaagagaccgcgtttcaggccatcgtcacgggcgagggcgagcactacattgaggtgcgcaccgatgcacccgttaaagtggcggtgtaccgcgagggctatgtgccgtgcgcgctttccgcgtacccggacaggttcgatgatgactacatcacaatagagccgagcacgtttccggatgtgctgtatcccgtcacggacggcgcggtgaacgtcaacggtcgcgaggtgctgtgggtgagcctcaaagtgaacgacgatgccgcgggcggcgattaccccgtggagatcagcgcaaacggcaaaagcgaaattttccgtttgacggtcgtgccggtcactttgccggagcagaagctcacgttcacgcagtggttccatggcgactgcatcgcagcgcgctacggcgtggagatttacgcaaaagagcactgggcattgttagacaagtatatgcgtatggcggcggaacacggcatgaacatgatcctgacgccggtgttcactcccgcgctcgataccgagatcggcaaagaacgcccgtgcacgcagcttgtggagatcacaaagaatgacgcgggttatcattttgatttcgcaaggcttgcccgctgggtggaaaccgcaaaggactgcggcatttctaagtttgagatttcccacttcttcacacagtggggtgcaaaatgtgcgccgaatatctacgtcaccgaaaacggcgaacgcaagctgaaattcggttggcatactgcggcaaccgacccggaatacgcggcattattgcatgcgctgctgccgcagctgcttacattctttgaagaagtaggcgttgaaaaaagtgaccttatgttccacatttcggacgagccgagcgaggagcacaaggcggactacttaaaggcgaaagccgttgtggagccgtatttgcccggctgcattctgcgcgacgcgctctcgtcgtatgattactacacggaggggctcgtcaagcaccccgtcgtcgcgacgaatcatatcacgccgtttatcgaaaacgatgtgccggatctgtgggcgtacacctgctgcggccagtgcgtggacgtgggcaaccgtttcctcgcgatgccctcaaaccgcaatcgcattttgggcgtgcagatgtggaagtatcacatcacgggcttcctgcactggggctataacttctggaactcgcaactctccaaagcggttatcgatccgttcaaggtgacggacgcaggcggcgcgttcccgggcggcgacggattttccgtctatcccggcgaaaacggcccgctgccgtcgctgcggcaaaagattttcgccatggcgctttatgatatgcgcgcgttgtcgctcgccgaagaaaagctcgggcgcgaaagcgtcttaaaactgctcggagacggcgaaagcatgacgtttgcaaactatccgcgcacatcgtcctatctgcctgatctgcgcgagcgcgtgaacgaagccatcggaaatgcgtgcaaatgaattgattttttaaagactgtcgtactgtttcggtgcggcggtctttttttctgaaatttgctctacccatatttgtggttttgtgctatgatgaatagaaacaaggaaaggaatgaccgaaatgttaaagacttctgaaaccaccgaaaagctgctgaagtttatcgacgcttctccgtcgtgttttcatgcggtgaaaaatatatgtgtaatgctggaagatgcgggctgcattcgcctgcttgaaaacgaaacctggacgctcgaaaagggcaagcgctactttacgacgcgcaacggctcttctgttttggcgttctccgtgccggaaaactataacggcatgcagattgtctccgcgcacagcgattccccgacgttccgcgtaaagagcggcgcggagatcaccgtagagggtcactacaaaaagctcaacaccgaaggctacggcggcatgatcctttccacgtggtttgatcgtccgctgtcgcttgccggccgcgccgtggtgcgtaccgaaagcggcgtaaagagcgtgcttttgaacattgaccgcgacctgtgcatcatcccgagccttgccattcacatgacgcgcggcatggcagatcacaagttaaacccgcaggtcgatctgctgcccttgctcggcggcgaaaacgccgattataacgcgctcatcgcggaagaggcaggcgttaaaaaggaagacgtcatctcgagcgatatgttcctctatccgcgccagcacggcgttgtattcggcatggagaacgaatttattgcatccccgcgcctcgacgacctccagtgcgcgttctccgcgacggaagcgtttttgaacgcggaaaacaaagaaaagctgctcatcagcgccgtgttcgataacgaagaagtcggctcgctgacaaagcagggcgcagattccacgttcctcacggataccgtgcgtcgcatcgcttccgcgctcaatatccccgaagcggagtggctgcgcaaaatgccggacagcttcatgctttccgccgataatgcccatgccgtgcacccgaactacacggaaaagtgtgaccagacgaaccgctgctacttaaacggcggcatcgtcatcaagtacagtgcaaaccagaagtatacaacggattccgtttccgccgccgtgttcggcgagatctgccgtaaggccgaggtgccggtgatgatcttccacaaccgctccgatatggcgggcggctctacgctcggcaatatctcaaacggtcacctgtcgctcaacacggtcgatatcggcatcccgcagctcgcgatgcactcctgcgtggaaacggcgggcgaaaaggacaccgcgtacatggtaaaggccatgacagcgttctataatgcggatatccgccagacggcagacggcatgtacacgttttaagttgcaatcggcataactctcttgaaaggaacggatataataatgtgggcagatgaagcggtgttttaccagatctatcccttgggctttaccggtgcgcccatgccgaacgacggcgtgtgcgtgaaccgcattcaaaaggtcaaagggtggattccgcacctgaaaaagttgcatatcggcgcggtgtatttttccccggtgtttgaatcggacaaccacggctacgatacgcgtgattttacaaaaatagactgccgcctcggcacgaatgaagacttcaaagccgtgtgcgatgcgctgcacgaaaacggcatcaaagttgtgctcgacggcgtgttcaaccatgtgggccgcggcttttttgcgttccgtgacgtgcaggagaaaaagtgggactctccctataaagactgatttcacttgaatttcgacggtaacagcgcctataacgacggcttttggtacgagggctgggagggacattacgagcttgtcaagctcaatctctataaccccaccgttgtcgagtaccttttaaactgcgtcggcagatggatcgacgaattcggcatcgacggcctgcgtctggacgtagcgtacatgttgaatgaagatttcatgcgccgcctgcgcgcgtactgcgatggcaaaaagccggagtttgtgctcatcggcgagatgattcacggcgattacaaccgcatcaccgcagacggcctgctgcacagcgtgacgaactacgagtgctacaaagggctttactctgcgttcaattcgatgaatctctttgagattgcgcattcgctcgggcggcagttcggcccggagccgtggacgctgtaccgcggcaagcacctgatgaacttcgccgataaccacgatgtaacgcgcatcgcgagcattttaaacgacgaaaagcaaatttacccgctgtacggcgtgctgttcgccatgccgggcattccgtgcctgtattacggcagcgagtggggcgcaaagggcgaaaagcatgagggtgacaacgccctgcgcccgtgcttcgatgcacccgtcgaaaacgagctgaccgcgttcatcgaaaaactcgcgaaggtgaagaccgaaagccgcgcattaaattacggagattataagaacatcaccattcagaataaaaatctgctgtttgagcgtcattgtgatcatgagacggtgtttgttgccgtcaatgcggaaaacgcgccgtgttccatagacgcccgcggcgagtacaaagcggtcgattttttaaccggcgaaacaagcgacatccacggcagggtggagctgccgccgtatggggtcaaatatttgaagctcgtataaaccgaatactttaaaaccggtgtattttttagaaaaagcagatgtgtcaccaaaatcggtagatacatctgctttttgtcgtgtttatggcgtgtttatcccgccttctccatttctgtcttcaatcggtgcaaaatgcgcttttcaagccttgagatgtacgactgcgaaatgccgagtgcatcggcaacttccttttgcgtgtgctccttttgccggttcagcccaaaccgcagctccatgatctgcttttcgcgcgggtcaagcttttcaacggcacggagcagcgtttgcttttccgattcctgctcgatgccgcgattcacaatgtcggggtcgctgccgagtagatcggagagcaggagctcgttgccgtcccaatccacattcagcgggtcgtcgagcgagatctcgtttttcagctgcgccgttttgcgcaggtacatcagaatctcgttttcaatgcaccgcgaagcatacgtcgcaagcttgatgttgcgctccacgctgaacgtatttaccgctttgatgagcccgatggtgccgatggaaatgaggtcttccacgttcacggcaggcgattcaaattttttcgcaatgtacacgacaagccgcaggttatgcgtgataagagggtcgcgtgcgttcggttttccgtcacggatgttctgaaaaaccacctgttcttccgctttcgtcagcggtggcggaagcgtttccgggccgtttatgtagtggcaggtgtcttcgttcagctttgataaaaagtgagcaaaaatttcgcgcatgcgggtgagaaaatcgtgtttcatgggatgtcctttccgggttttaaaccctgtatctgcgcggcgtcacacacggcggcgccgacgagcgcctgaaaactccctacggaaagcgtgcggtcggtcacggccacccaacattcgattgatatgcccgaaagcgaagccgcatccggccgaaacgcgggcaaaacaccgtccgctccgagtgaagaaaacgggatgagccgcatagaaacagcattttccgtgctttgcattccgaaattcggcggcaatatggcaccgagcgcacgccgattcgcaacgatggcaggcgtgccggaaaaaggctccgtcagcgtcagccccgtgtcaattttcgccggcagcgtgacggttttgccctgccgtgtgatggtcagttttgcgaaaaacacgtccggctcctttttgcgaaacaggcggtcgaagccgtacagcacgccgtaagagacgcacgtgagcaaaatgagcgtcaatgcggaaatgttaaaatacaccgcgccgtttgcgagcaaaatgccgtgtatcggcagaaaatacgccgcagccgtcaaaagcccggaaagcgccgcgccaaacaaaaacagcaaaaaaacggcttttaaaagctgcgtcatcggctttggcgcaaacgctgccgcgcacagcgcaagcgattccaacagcgccagcggaaacaaaacaacccccggcagcgcgggcagcagggcagaaagcccaaacaccccgccgagcacggaagcgagcaaaagcctttttcccgtaagcggcagccgtaaaaaacgccgtaccgcgctgagcaaaagcgcgtctatgtagaggttcacgatgaaaagcaggtcggcataaacggtcacgctttcacctcccgacaccagtatacatgtgggacaaattttgattctgtcacattgtgccgccgggaaaaattttcggaaaaggcggcggaacgcgtgctgcttgcgggttttgcattgacaaaatccgcattgcctgctatgctgaaaatacttttggaggtggcgtttctatgaaccgaatttctgttttttacgagcacatggcagaagccatgaagcaggagaatattacattagatgaagtgtgtgcggcggtaaaacgctttggctttgccggtgtggagctcgacgcgaaccgcatcaaaaacgagggtgatgtaattttgcctgcgctgcaaaaagccgatctttgcgtgaacggcatttataattttttcgatttcggcagcgagacgggttccccggaaaacgaccgtgcggaatctctgcgcgtcatagactgctgtgaaaaagcaaactgcaagttcctgcttgccgtggcgggttttttgacggaggacgaaatggtgcgcggcagcgcaaagtatgaagcccgccgtctgcgcatggcggcgtctttaacggagcttacagcggaagcggaaaagcacggcatcacggttgtcatggaggagttcgataaccttacggcgccgtactcccgcgccgatgaactcatgtggttcatgcggcatgtgcccggtctgcgctgtggctttgataccggcaatttcctttataatgaggaggacgcggtgaagagcttttccctgttccgtccgtacattgcgtccgtgcactgcaaagaccgcacgtttacggaaaacaccggcagtccgtgcgtcacggtcgcaaaccgcaagctgtatcccgtggcggtaggcgacggcaatctgcccattgaaaaaatgatgcgtgttttgcttgactccggttacaccggcagctttgcggcagaacatttcggctccatagagcagctgaaatgcatggagcgctcggcggcgtttttgaagcgggtactcggggagaagtgaggcgaacaatttgtaaattggagatactatggaaaatcacagaattttgattgttgaagatgatgaggctattgcgggtgcggtcagccgcatcatcgaatcttgggggcttaccccgcgctgtgtccgcgattttcgcgatgttctgcgcgaatttacggatttcgacccgcatcttgtcctcatggacatcaccctgccgttttttaacggctaccactggtgcagcgagatccgaaaaatatccgccgtgccgatcattttcgtctccagcgcgtcggaaaatatgaatattgtgatggcggtagacatgggcggcgatgattttatcgcaaagccgttcgacccctccgtgcttatggcaaaaattcgcgccgttttgcgccgtacctacgacctcggcgaccgtgtgccggtcattgagcgtggcggcgcggtcttgaacctgaacgatgagaccgtgacgcacgacggccaaaaggtgcagctcacgcgcaatgagttccgtattttgcagacgcttatggaaagccgcggcaaggtcgtcagccgcgaaacgctcatgacacgcctttgggaatacgacctgtacattgaggaaaacacgctgaccgtcaacatgacccgcctgcgtaagaagctttccggcatcggcctgaccgatttcatcacgacgcgcgtcggcagcggctatgtcgttttgtgaggtgacccatgaagaaaaaagaaagcgcgctgtttttctcatacctgtgcgcacacattttgcagattgcgtttttgctgctgtgctttgccatttttgcggtgattctctatttatacgatttgcccgccgatcccgttttgtacgcggcgctgctgtgcgcggcggtggggcttttaagctttattttaagctatctgcggtttcataagcagtttcgccggttggaatcggcgcttttgaatctgcccgaatcgcgcgatgacctcccggagccctcgggcagcacggccgtgtgttatgacgaagccgtgcgcatgctgtgcaccaagctcgcccaaagtgagaccgaccgccgccgtgggcaggaggagaacaccgattatttcaccatgtgggtacaccagatcaaaacgcccatctccgccatgcggctgatgctcggcgaagaagataccccgcgcagccgcgcactttccgcagagctgttccgcatagaccgctatgccgaaatggccttgaattacgcgcgcctaaacagcacgtcaaacgaccttgtgttcgccaaagtcgaggtcgaacccgtcataaagcgcgtcgtgcggcagtacgccgggcagtttgtccgcaagcacatcgcgttaaagtgcgatattgtcccggtgcaggtcttaacggacgaaaagtggttggcgttcattttgggtcagctgctcgcaaacgccgtaaaatatacggaaagcggcaccgtgaccgttaccgtcacaaagaataaggtcttaaaggtcagcgataccggcatcggcatcgcaccggaagacctgccgcgcatttttgaaaagggcttcacgggctataacggcagggcagaaaagaaatcgacgggtctcggcatgtatctgagccgccgcgccgccgatatgctcggccacacgctttccgtgcagtccgcccccggcgcaggcagcaccttttcgctcgatatgaaggaaagcaatttacaggtggagtgaccttacaaaaatgtaagctccgcctttcattttgtaaggtgaatcgatgttctgcgtccgctttttgctgtatacttttgtcaacgaattgaaaaaggagacttatttatggctgttttggaagtcaatggattgaaaaaggtatacaccacgcggttcggcggcagccgcgtgcaggcgctcacgaatgtcacatttgccgtggagcgcggcgagtatgtcgccatcatgggcgaatccggttccggcaaaacgacgctcttaaatatcctggcggcgcttgaccgtcccacggagggtgaggtattcttaaacggacgcgcactctcgaccatcggcgaaaaggagattgcttcgttccgccgccagaacctcgggtttgtttttcaggatttcaacctgcttgataccttcaccctgcaggataatatttttctgccgctcgttttggcgggcaagcatttcccggagatgcaggcgaagcttttgccgatcgcgcagcagctcggcattgcagatctgctccagaagtacccgtacgaggtctccggcggccagaagcagcgcgccgccgtggcgcgtgcactcatcacctcaccgcagattctccttgcggatgaacccaccggcgcactcgattcccgcgcgtccgacagccttttatcgctctttggcgagattaaccgcgccggtcagacgattttgatggtcacgcactccactaaagccgcaagccatgccggccgcgtactgttcatcaaggacggcgttgtgttccaccaaatttaccgcggtggttccacaaatgaagagatgttccaccgtatttcggataccctcaccgccatggcggcaggcgcgtaacgggagggcacgaaaatgaataacttatatgtgcgcttggcggcgcagaacatcaaaaagcaccgccgcagctacgtgccgtttatgctggcgggcgtttttgtggcagcggtcagctacattttaaattcgctttctaataatacggagctcggtcccacgtcgcaaatgatgttcacgctcggcagcaccgttgtcatgctgtttgccgttatatttttgttttacacgaacagctttttgatgaagcagcgtaaaaaggaactcggtctctataatgtgctcggcatgaacaaaggccacattgcccgcgtcatcgggttggaaacgcttttcacggcgcttatcgttattgtaggcggttgcgccgtcggcattttgcttgataaactcacatttctcattgttgccaaaatgatacgcatcacgccgaattacggctttcacatcatcccgaaaagcctgcagtacgttgctgttgtgttcggcgtaatctacgttttgatttacatctcgaatgtgtttcgtgtgcgcatttcgcgccccatagagcttctgcacggcacgaacgtcggcgagcgcgagccgaagacgaaagcgttcatggccattctcggcgtgctgtgcctcggctccggctatgcgctttccattctgtcttcccgtgagcctgtcctcaccatctccctgtttttcgttgccgtcctcctcgtcattatcggcacgtatttcctgttcacggcgggcagcatcgcgcttttaaagcttttgcgccgcaataaaaattattattacaaaacaagccacttcatcagtgtttccggcatgctgtatcgcatgaagcaaaacgccgtcggccttgcaaatatctgcattctctccaccatggtgctcgtcattttgtcctccacctgctcgctgtggttcggcgccgaggatatgatccacacacgctacccggcagatgttctggtgagtatggaagacccgaaccacatgatcgacatggacacctttctggccgatgagctgaaaagtgttccgggcggcagctatacgtcctatgaattcctgaccggctacgattccacagaagaaaccgaagaccattcctctgcaatcttcatgaaagacggcgccgcgcaggtcgactccatcacgcgtaacgtgctgtttttttccgcagagacctataaccgcatcacaggcgaaaacgtgaccgtggaaccgggcacggcgctttatatgagtgtagacggcgtacctatgccggacaccatgacatttgcgggcacgacgtatacgcttttacccacgccgaagtcctttaacctgcgcggcagatatcacgcttacgtctccaagccgtatgtcgttgttctgccggattatgcggaaaaaagtcaagtcatcacgcccaccgagtactactgcatctcgctcggcaaactgagagatgaggaacaacagacgttttacgatgcgatccgcgaagacgttacgaccatcatgccggacgaagaaagcgtattctgggacgaagacggatacttcagttttgagtgccgtgtcgagaatacgaaggaaattcgcagcatgtatggcagcttcctctttatgggcatctcgctcggctttgtgttcaccatggcggccgtgctcatcatttactataagcagatttccgaaggtatggaggataagaaccgctttaccatcatgcagcaggtcggcctcagccaaaaggaagtaaagcactctatccatacgcagattttgaccgttttcttcttgccgctcatcacagccggcatccacgtgatgttcgcgtaccccatcatccgcgctattctgcgtgctatgatgctcagttccgaaacggtgtttattacctgcaccgtcgcgtcgttcctcgtattctccgtgctctatgcggtcgtctatgccctcaccgcaaaggtgtattaccgcatcatcagcgaagacaacaaatagagattacaagatttattcctgcaaaaagccctccgcctcccgaaaaatcggaagcggagggctttgcaatttttgtttgaagattaaacgttgaagcggaacagaacgatgtcgccgtcctgcatcacatactccttgccttcgctgcgtacaaggcctttttctttcgcggccgccatggtgccgcatgccatcagatcgtcaaatgcaatgacttcggcacggatgaagccgcgctcgaaatcgctgtgaattttgcccgcagcctgcggggccttcgtgcccttcttaatcgtccaggcgcgcacctcgggcttgccggcggtcaggtaggagatgagaccgagcagggagtagcacgcgttgatgaggcggtcaaggccggattcggtcagacccatgtcggcgaggaaaagttccttttcctccgggtccatgccggaaatttcggcttcgatctccgcgcagatcggcagcacagcagcgtgctgctcgtcggcgatcttcttcacggcgagatagccggggttgttttcaatgccgtttgcaaagtcggattcgctcatgttggcggcgaaaatgatgggcttattcgtcagcaggttgacggaagcgagcagctcggcttcctcctcgtcacacgccacgctgcgggcgggcttgccggcatccagcgcctcgtgtacgcgctcaaagaactccagctcgctctggtacttcttgtccgccttgatcatctttttcgtcttgtcaatgcggcggtcaagcacctcaatgtcggagagaatcagctcaaggtcgattgtctcaatgtcgcgggccgggtcgatggagccctcgacgtgaataatgtcgtcgttttcgaagcagcgcaccacatggaccaccgcgtccacctcgcggatattggagagaaacttgttgccgaggccctcgcccttcgacgcgcccttcacaagacccgcaatgtccacaaactcgatcgtcgccggggtgaacttttccggctcgtacatttctgccagcttatcgaggcgcttgtccggcacggcaacaacgcccacgtttggctcaatggtgcagaacgggtagttcgcagactgcgcccccgcattcgtgatcgcattaaaaagtgtgctcttgccgacgttcggcagaccgacgatacctaatttcatatatactcattctccttcgatttttccttgatttgcaagggttttcgggttttggcttttcggctactacgccatttttacgccattttcgcattgagttttatgtcagaaaacccttttgactcaaactgccgtacagcttggtcgagcgaatcggtagttacatgaacatacctatccatcgttgtcttgatactggcatgacccaatagcttttgcagcactttcggctgcataccactttcgatggctcttgtggcgtaagtatggcgtagagcgtgcatacaaaagcgatttatccctgcttcgtcgcagagcttgtaaaggtgggtatcataggagctgttcttcgctggctctcctgtacgccagttgataaaaacaaggtcacgcataacaagctgtgaggttgtgcctgtgcgcctgtctatgtattcaagcgtctgtgaaagcaagggagactctttcctgttatcccggctatcccaaatgcttttcagaatatcgtaggctctgttcgtcaagggaattgtgcgataactctgttgagtctttggaggacctgcacgccagtatttttgagcgtgcctaaactccaaagtcttgttgaccgtaagtgttcgtttttcaaagtcaatcgcatcccaagttaatccaatcatttcgccagtacgcaagcctgtttcgaggataagggcgtattggttatagttgtgggaacgctgggcaacttcaagaaaacgttgttggtcatcgcaagtaagaaactttatatcatccacagcacgaactggctttgtaaaccgcacaccatccattgggtgtctggcaatcaagtcattcattttcgccgccttgaacaatgtgcccatagcaatataggcttgtcggatagtagaaccagcataatcagcgtccatccgaatcaagacttgcttacagtgcatgggcttgacattggcaatcgccattctaccgataacgggctgaatgtttttggaatatcgctcccgataattgcggagcgtattaggggctaagtcacctactatattttcaatccagaaactaaaccattggtcaaccgttgtttcggtggcaacaaaaacttcttcgtgcttgtcggcatatttcgcttcttccatccaattccttgcttcgggaatagtctgaaaatatttctcatgcctttttcctgttttatcaacaaatcgtgcgctgtataaaccatcctttctttggtagatacccttaccgcagtcttttcctttgagattttttcccatgaaatgctcctttcccttgaagggaaatggacgcactgctacacgataagtatagcagattttgtccattccctcaagtagttattgtgaaaaactctccggcaatttgtaaatttttcggaacttcttatatcaccagtttctcactgatgaattgctcaaattcctttcgtttgaccagcttctttgtgccgacaaacaaaacgaaggggcagttgggcgagcggagcatactgtcgatcttgttgatgccgatgttgctgtattctgccgcctccttggtggtcagtgtcattttcagatggatcggaacggtgccgatgcaattctccatgtaaaagctcctttcttgggtttatcagccgagcagacgagccgccgttttcagattgtcggcagcggtgcttttgcggaagctgtctccatcgaacatgatcgggacgcagacctccaagatgcggtcataaattcggcggtcatccagatcgacagcttgcttcataacggaaagcgggatattcgtggtgacgatcatgggcttgccggtcagcagccgtttgtcaaccacatcgaacactcgctccttaccgaagctggtgttacgttctgcccccaaatcatccagaatgaggaggtcggggcgcataagcgatttcatgtaattgtcgcggtccgaaccaaagttaccctgcatacggttgactacatcagacattcccacaaagaggacggactccagacggtcaatcagagcgttggcaatgcatccagcggcataggattttcccgtgccgacattcccgaacaggagcagcccgattcctgcttttttgaactcgtcccagttctgcgcgtaacccctcgcctttgcaagctggggcgttgtaactgcggctgactcaaaccgccagccagcggcgggcatatcgcggaacgcctcgctgcggagcatcgtcatgtaagacattctctcatattcccgacgctccgcttcttcccgttctcggcgttcggcgacacacttgcacataaccgggtgcttggtaaagccctgtgcctgaaggtctgcggggtaaaaggcttctttcggcgtatggcacttgccgcagtatttcagcccatcagcggaattgatgtaatcgtcaggtgcggcattagccgcttcaacggcatcaaccatttttgtaaaaatcggattcatagacactctccctcgttatcgtcgtaagtgtagtttttcgctctcctgcccttgctgtcctcgtccaaccacttcttgatggtggcgtaatgattggcatagtgcctgtcattggaagccatgtaccgggacagccgctcaatgtattcggcagctttgccgggataagccgtctccagccgggaatattcctctcctgacagaaaaacattttgatactctccatatcggcggcgcgtactctctactctttcggtcttactctgttctttatattctgtattagtattacttgtgggcaatttctgcccatcaagaggggcggttttctgcacttctgaaaggcagcctttgcccatcagaggggaagaaagctgcaccccatcgggtatttgcagaaacagcctgttagccttggtcaagccctgtcggacgcgagtcagcagcccggcattttccagttcgcacaaggcggtttttaccgttctttcgctccgattcaggtcattcgccatctgcttgattgtgtagatgacatacacatttccgtcctctgatacccaccccgatttttgcgaaagcatcgtgcgattcagcaggagggcatacagcagtttagcgttgatggaatgttcgctgactaccataaattgtggcaaaggaatgaacggtgggagcgaggtatcaatcttgatatagatggcgtatcacttcctttcggtgtctgcggtattcatggtggcgttccatcgggtccgcgaggggagtacgcagatgtaccacccttttttgccctcttggattgataatgcgggcaaataacgacaaccgcccggaaactctgcttgcaatcgtggacgcagcggcggcagagcgtgttgtacgccttgcgtccccggtcattcaggaagaacgaccattccagcttttttgatttgctcatgcgcggcatatctgtactcctttcccgaattacaattcgtttctctgctgtactttcagcagctcccatacgtcagccatccgttctttcagctcggcaacgtcggcatcgtagaaatgcccggtgctgttgatgcggcggcagacgtggttgatgtttgtggcaatcctgctgacagcggcagctaactttttctgctcggtgtaatcgaccttgatgatgtacccgtcaatcagcattttccgggcatacgcgccgaagttgtgggtgccgagttgattcatcttgtggcgaactacgctcaattcctgctcatttaggcagatttccttgcggatgggtcgtgtgcggtctggcatatcaaagaactcctttcactttacaacggacacctttttgccgtttgttgagtatggcggcaaaaattttttcctttcactttacaacggacatttttaagtcaaaacgcaggtatcgaaatgagaaattttcaaaaaatatgcgcccctgcttttgcgaaagcgggagcgcggtgtatctgcggatatgagatttgagagagtagcaagcacatccggtgtccgtacacaccggaaaaaggagcggttctgccttgcgcccgaactgctcattttgttgttggggaatccccacacccctttcatgtctgaattgaaaatacttcctgaacttttcagaaagcccttgcttttattcgctttgacgattataattatactgtgattttataagcagacgcggaacttaactgcaacaggagtgctacccatgaagtatttatctatcgcgcaaaccgccgaacgctggggcatctccacccgccgtattcagattttgtgcggcgaggggcgcgtccccggtgctatccgcattggctcggtctgggggattccagaggacgcagagaagccagcggacgcgagaatcaagaacggcaagtatatcaaaaaaactgccgaaaatgaaaaataagccgcagattatatcagcgactctaactcgaaataatggggtctattccacctcgcgggtgcgaatgggcgcactgatcccttgtcacgaatctacctaaatcgtcgattcgacaaacgatgacagtgtttgacaaagatttagtccttccgagacaggataggtctttcaccacaataaccactgcacaggcatagacaggagtgaccctcattactgctgagggtcagggtagaaaaaccctcatttgaaatgaggataacacgattatggaggaaatcagccatgccaacacttgaatggattggaaagagcaaggttatcaatcatcatcaggaagttccgttccgggtgttggagcgcaagtatagctttgacgaaaacggggagcatagcgaggacaacggcagcgacaacatgattatccggggtgacaaccttgaagccctgaaagccctgctgccccggtacgaggggcgcgtcaagtgcatctacatcgatccgccctacaacactggcaacgagggctgggtttataacgacaacgtcaacgatccgaaaatcaaaaagtggctgggtgaggttgtcggcaaagagggcgaggacttgacccgccatgacaagtggctgtgcatgatgtacccgcgcttgaagctgctgcaaaagctgctggcggacgatggtgttattttcatcagcattgatgacagagagcaagtattactacggatgatatgtaacgaaatttttggtgaaaataatttcttggcacaatttgtttggcaaaaacgcacctctcccgatatgcgtaaattggtaagtaccgcccacgaatatgtatgcgcgtattgtaaagacatctcttatctccctaacgcaataagcaaagttgcattaagcgaagaagatgccgagaattataaaaatccagataatgacccccgtggtccgtgggcatcgagcgattttacagcgcagggttttcgtccgaaccagatgtatgaaattattacaccaggcggagcgagatatactcccccagaaggtcgttgttggaaaaacgtggagagtgagtttatcaagcaacgtgatgaaggacgaatgtggtttggagctgacggaaagggcataccgcgtcgaaagacctacttatctgaacgggagggtaaaaacgtttggacttggtgggataacaagggcgtcgggcattcgcaggaagctacaaaagagattggaaaaatcttcggtacgccaacagcttttgactatccaaaacctgttcgattgatacagcgtataattcaaattgctacaagaaaagactcgattgtacttgattctttcgctgggtctggtacaacagcgcaagcggttcttaacatgaataagcatgatggtggatgcagaagaatcatccttgttgaaatgggagactatgctgacagcatcaccgccgaacgcgtcaagcgtgttatcaatggctacggcgagggcaagaatgccgtggcgggtacgggcggcaatttcagcttttatgacttgggcgaaccgctgcttgtgggcgattgcctgaatgaagcggttgccccagagaaaatccgggaatacatctggttcatggaaaccaagcagccctacgccccacctatcggcgacaatccgtattacctcggcaagcacaacagcacaggctattacttctactacgagccgcagcgcgtgacggtactggattatgcgtttctctccaccattacggaaaaagctgatgggacggtgatctacgccgaccgctgctctatcagcgaggataagctggcaaaaatgggcatcacatttaagaaaattccgcgcgatattagcagactgtaagggggtgttcgctgtatggaactgaaatcatatcagaaaaaggttatagcggacctgacccgctatctggaactgctgaacgaaacaaagagtgacgcagcggcgtttcgcctgttttggcaggaaaaatcagccccgactttagggctataccaaaacgttatacccggtgttccaaacctctgcttcaaggtgccgacaggcggcggcaagacctttattgcctgcaacgccgttcgccccatctttgacgcgctccccgctaccaagacaaaggcggtcgtgtggcttgttccgtcggacgcgattttgacgcaaacggcaaaatcactgaagaacccgcagcacccctaccgtcaaaaaatcgacgtggatttcggcgggcgtgtggaggtctacaccaagcaggagcttttgaacggtcagaacttcaaccccaccgccgtaacggagcagttgtcggttatggtgctgtcctacgattcgttccgtgggcgcggcaaggaggtcttgaaagcctatcaggagaacagcaaccttgccgagtttgcaaaggtgctgggtaagcccgacagccccattgaaaaagcggatgaaaccgcactgttccagatcatcaaccagcttaacccgcttgtcatcgtggacgagagccaccatgcccggtcggaattgagccttgaaatgctggaaaacttcaatccctgctttgtgctggatttgaccgccacgccgaaaaaggagagcaatatcatctcctatgtggacgcggtgcagctgaaaaacgaacacatggtaaagctgcccgtgatcgtctataaccgggacagccaatccgaggtactgattgacgcgatcgacctgcggaacaaactggaagaaatcgcaagcgcggagtacgccaagacggggaaatatatccgccctatcgcgctgtttcaggcacagccgaaaggcaaggaggacgcgaccacctttgaaaaactgcgggacaaactggtggacgccgggattcccgccgagcaaattgccattcgtaccgctgatgtgaacgaactgaaaaatgtggagttgatgtccctaagctgtccgattcgatacattatcacggtcaatgcgctgaaagagggctgggattgcccctttgcctatatccttgcgtctcttgccaataagacaagtcaggttgacgtggagcagattttaggacggattctccgtctgccccatacgagccagcacacacagagcgcactcaatatgtcctatgtgctgacttcttccaacgacttcaacaatactgtggcgcatatagtcaagggcttgaacagcgcaggattcagcgataaggactatcggatcggtgagtccgcaaaaccgcaggttcccgaacagccagcagaacaaatcacgctgcctgatcaacaagggtgtcctgaaatggaaccccctttggaaaccgccgaggacgatttttcggggctggatgggaaatctatcggggcagagttggagcggcgcagagaacaggcacaaacgcctgaaactgccccgaaagccgacaccatgctggacgctgccgcagaggtcgaaaaggcatatacagacgctatccaacagacagacaatgacccgatgatggacaatcttccgtgggaggtgcgggataaagtgaaatcattccaagtaaacccgcagttccgggaggatattgaaacgctgcaaatcccgcagtttttcctgaaagttgagcaatctttgtttacggacggttcttttgaactgctggacaaggaaatgctggcagagggctttaccctcaaaggcaaggcatacgatattgattttgctaccgcagacgatgaaatccgtgaaatcgacgtgcgggagcaggatggcggcttgccgaaggtgttcaagatggagagcgccgagcagcggtacttcaaggagtggttcaacaatctgccgccggaaagccgggtacgtcaatgcaaggatatgatgttcaatcagcttaacaagctgaacatggtagacgctgccgaactgaaagcctacataaaccgcattgtggacgatatggacaaggcgcaactcaccgcgatggagaaagccccgctgggctatgcggcgaagatccgtgacaagattgaaacgctgctggaagcccactatcgggaaacctttgataagtggctggaaacggagcgcatcgtctgcaagccctatttccgtctgcgcccctctatccatcctgccacatataccgacatatatgcccgttctctgtatgcagcagaggacggtgacatgaacaaactggaacagaagttgattgtagagttgaccgccctgccgaatgtccgctggtggcacagaaatattgcacgtcaagactttgcaattaacggctttatcaagcactaccccgatattctgattatgacccagtgcggcaagctcatctgtgcggaaactaagggcgaacatctgaaaaatgatgacagccgggagaaaattgcactcggtcaagcgtggcgcacagcagcgggcaagaatttccgctattacatggtgtttgagaatgaggaaaacctcttgccgggtgcggtgagcatgagccagtttatcgacacggttaaggcattgtaaatcaaataaccatatatccgtcacttgcagggggcgataaaatctacccccgataagaagcagtgccgattcgggcagcaggagcaattctgctgctcgttttcttttgtgtgaccccctggctcatgcgccgcagggtagtcataaataacaatcagcaaggaggttaattgtccaatgaaaaacagtaagcgaggaggtgcgccgcctatgaaccacatcgggaatatccgtatatctgcaagggagggcttatatggcaaagaaacttgaccctcaagagatagagcagtcccgccgaaaaaaaactcgcgccgataatcgggaggaacgcaaggagcgcatacatgacggaatccgcaagaatcgggaaagcggcggtgtaattataataccgccacccccagccgtacaagcgcaagggcagactccccgaaaaatgcgtgttgcagcttatgtccgtgtcagcacacaggaagaacagcaagtaggcagttttgagatgcaaattgtctatttcaaatccaaaattgagagcaatcccgattgggagttagtaaaaatctatcaagattacggcgtaagcggcacttccacgaacaagcggcagggatttaaggacatgattgatgacgcaaaagcaggcaagattgacctaattttgacaaagggcataaatcgctttggtagaaatacggttgatattttgaacaatttgcgtactctgaacgccttgactccacctgtcccggtgcgatttgaaagcgaagggctgtcctctatcggggatggcagcaacaatctactgatagcggtcttgtcagcacttgcagaattggaatcacagcaaaagagcgaagccatcaaaaacggtattcgctggcgcatggcagagggtatctaccaattctcggtgataaacacgcttggctactattgggaccacttcggacgattgctgatcgagccaacagaagcaaagattgttgagtacatctacgaaagctgtttggaaggtgcaacccccgcagaaattgccgccgcgctgaccgagcaaggcatcaaatcgcctaaagggaaagatttttggcgggctgctactattcgcggtattctccggaacgagaaatattgcggggacgcactcatgcagaaaacttgtacgattgattttcgggagcataagtcagtgaaaaacactatgctcaacaagtatttcaaagaggaacaccacacagcaatcataaaaaaatccgattggcagaaggtgcaacagattttagatgaaaagccactacccggcaaatcggcaaggctacacgctatgccaaagcggttcacggtcacacgttctaaagacaagtatttcagagggtatatcattttagacccgcgctggacagcttcggaacgccgcgaactgctgaaagagctgaaaaatctctaataccgaaaggaaaatccattatgaaatttgattttaacgcactgaactttgagatccttgatgcgaacaccaacgcataccccgacattttcattaaccagaacggtgtcacctttacgaaaaaggtacttgatgacctgaactatcctgctgttgtcctgtgccagcttgacgcaaaaaacaaggtttttgcggttcgtatgtgtaagagtagtgagcagaggggctacaagttctccaagccgaagggtgagcagaaggccacggtcagcatcaccaacaagaatctggttgaccccattcgtgccgctatggagggcgtttggcaaagcgataaacgctatcgtgtgcgtggcttttgggtcgcagacgcaaaaacgatgtgttttgacctctccgagggtgtgcaggaggattatagaaatgccgccagcgataatgaaagcgaggaataaatcggtgaacggattgttcaccgtctgaacttccgaatgacagtggggcaagctcattatgggcttgccccttgcttaaataaaggcgggtatttgcagattgtaacgcacaaggggcagataagtgaaatgtagggtggtaatatggcagagaaaaataaacggcgcacaagcgataatatccccgatatttgccccgaaggacaacaaaaaaacaggcgtgggagttgttagcgtcccacacctgttggaaaactgatttgtagcagcggcgtacctatatccctcgtgtaagttttctctacgccatttttacgccattttcgtatagagtagcataggaaaacatgaagttatatatggttggtttgttccaaaatccgcttcaaatcaagtaatattcgtatttattgaggattattgagatataaaatcaggtagcggtcctccgatacctaatttcatttttcgttttacctgtccgaaaacccgcattttatttggattttcgcctttcgctgaatttcttttacgccctttctacgcccttttttgtaactggcggcgtagtttgctgaaacaggcgtaccgcatttgccagtgattcgtccgtaacaggaacatacctgtccatggtggttttaatgcttgcgtgttttgcacgtcaaacctttgagatttttgcccatttatcggactcctttcttattcttaaaaagagtccaacgcagttacatattatagcataaggactctgctttttcaatctcaacgggaatttttcgggacttttgcggctaaaagctctatatgaccagtttatggcggatatattcttcaaattcacgccgcttcacgagcttccgcgtcccgataaaaagcacgaacgggcaattcggctgcttcagcatggcgtctattttgtttattccgatgctgctgtattccgccgcttcttttatcgttagtgtcattttaaggtggattggcacgtgtgcttcgggttgcacgcacatcggcgttacggctcctttgcagtgaagatcacatgtgaagttttgttctttgtcgctcatagtggtgtttcctcctgttctgcgaatacacgaaagatggtcatttcggtatgtaacctgccaaacggtcgggagcgagccgacgccacgggagttttaccccaactgacggtctgtcagagccattctcattgcctgcggcaccatcggagtggcggtctcttaggtgctcggactgtgactgaacgggagtatcattatgttctttgcgggtcatagcggaaccgggagctgcccggtattctaagtcgatgaatttcgctcgctgaaaagcaggtcatggcgcaccgctttgcacgctcgccgcaaagagaacgtatttgacaagtggatattcagttttcaaggttcaaaagggaaacggtgcagccgtttcgggggacgcaaaatcaaaacgcaccgaggaaaaaatacccttcactatacacgacattttttggtgatttataaacgggggaaagtcgtttgtttataaattgtttacaattagaaacttatcgggttatcatcacaataaaaatgaaaatggctttattaaagtaatgagggcatccctcggctaagggataccctcaaaatcactcttgcttttcttatttacataactttagctgcgcttgatttcacgcttcttgatactagaatataaatagtacaagccaaaatgagaaattccaaatacacataagcatggtacaatagagacaagctgaaggaggatctcatatggcaaagcaacatgacaaacaatttaaacttgatgcggtccagtactatcaggatcacaaagatctcggagtacgtggatgtgcagaaaatcttggcatcggatacagcacattaacaaagtggccgaaagacttccgtgaatcaggtgatattcctgttcgtggttctggtaattatgcatctgacgagcagaaggaaattgcccgtctcaggcgtgaattacgtgatgcccaaggtgcacttgatgtgttaaaaaaagcaatcaacattctgggaaaatgacgaacgccatttaccttgaagtgtctgagaagacggaagctgccaaaaaggccggacgccgggtttccgtctccggaatgttgaaaatttcaggtgtctctcgctcaggatatcttgcatggctccaccacgtaattacaaaatatccttgatgagcaatttaatcctgatcgtccgaatgcagtctggtgttcggatattacctacatataaaacagcacacactaaggcggagctgctggcaggttgaatttgggagaaatttctcattttaacttgtactgaatcttgacataggaccaaacatgtgataaaattactgaaatttaaaggagagtccttttttctatgtctgttttcacggacttgcgcaacctctgtacagatgcaatagtattgtcacagtgagcaatgtctcacatattgaacgaaaaaaacaggaggaaaaattcatgacaaagttatactatcagtttccaaacacctggttcggcgactgcatgccttttggaaaaggagatcagttttatctgtttcaccaaagagataccagaaaaccctgcccgtttggcgaaccctttggctgggatctggcggtgacttctgattttgtgcactatgaggataaagggacagcgctcccgcggggaaccgacgaggagcaggatcagtttatttttgcaggaagcgtttttgaagcagagggaaagtatcacattttctataccggattcaaccgggactatccaaagcttggcaaggcatcccaggtgctgatgcatgcggagagcgatgatctgctgaactggaccaaggcccaggacaagctgacttttacaccgcaggagggttatgacccggatgactggcgggatcccttcgtgatctggaatgaggaaaaacaggaatacctgctggttttgggaaccagaaaggccggacccaaggaacagcagaccggacgtaccgtaaagtttacctccaaagacctgaaaaattggaaatttgagggagatttctgggcaccgggcctgtttaccatgcatgaaatgccggatctgttccagatcggtgactggtggtatcacattatttccgaatacagcgacggaaataagatggtgtaccggatgagcaaaagtctggatggtccatggatcgctcctgcggacgatgcttttgatggacgtgcttactatgcgggcagaaccttctgcctgaacgggcagcgcattctgtttggctgggttcccacgaaagagaactgcgatgaccgtggaaacttcgagtgggcaggcacatttgtggcacatgaggtgtatcagagaggggacggaaccctgggcgtcaggatccccgacactgtatggaacgcctttgaggagggagagaaagctgaagatatggtgatcgataccccttatgccagacaggaacagatacttttcaatgatactacagacctattccgctttgaagcagatgtggaattttccgaaggcacccgctcttttggacttcgcttttatgaaaacgaagagaccggtcagagctatcagtatttatttaatataaaagaaaaccgttaccgctttgaaacgagtcccaacatgccctggcctgcaaaccagaacatcggactggaacggcccatcagactggaagcgggaaagaagtaccatatccaaatgatcctggatgacaccatcgcaacgatctatgtggacggagtggctctgaatacacggttttatcagaaatttggccagtccctcagtctgtttgtgacagacggaacgctgacagtaacaaatgcaggcctgtcaaaaaccataaaatgaatagtgattgacattcccccaaaagtattataatctgatatcagataccaacttgtcgaaaaagtccagtggaagctgggctttttctcgtagatatggtggtcctatgtcaagatttagtacaagttaaaatgagaaatttctcccaaattcaacctgccagcagctccgtcttagtgtgtgctcttttatatactcgctcgaattcatctggtgacataaaatcgcaatgactgtgaattcgttttgtgttgtaaaaagcttccagatattcgaaaatcaaccggtatgcctgcttgtaatcgcgaattttaaagcaattgagccattcacgtttgataatagaatgaaaggattccatgcacgcattatcccacggaaaagctttcttcgaataactgcgctgcatgttttcggttgcttttttataaagctgaagtaagcagaaagggttcaggaatttccctgataagtgtcgttgtggtatcacaacggcgatgcttgcgatataattatttcggcgacaggatagtatttttgaataaacatggttttctcttttctttgtaaatttaactgtggtaaatcaaaaattcttttctagttgcccagttcctaaggtataatgaaggggatcggtctgacgaggcgatgcatgagctgctacgctcgtccagcaaactgtcagccgcctctcattgcatcgttcgatttatgtaggttgaattaaaggagtcaactcccacattcgaataacaacgcaagctgaatcggcactgagtaacagcggccaccgaacatgattaggaggttgaaatccatggcgtctattttgtttattccgatgctgctgtattccgccgcttcttttatcgttagtgtcattttaaggtggattgatacgtgtgcttcgacttgcgcacacatcggcgttacggctcttttgcagtgaagatcacaagtgaagtttcgttctttgtcgctcatagtggtgttttctcctgttctgtggatgcaccgaaagacagtggaacaatctgcttcgaatgtttcgaatggaagcagtgtagatttaaaaagttgttttgggctgtctctttattttcctttgcttttgaggccggacacacaaaagtaaatatgtggggaaattggatattatcggcaggtggtgttagttgtttttgtctgtcggtcaagtcccatagagctttatttataaaaaaaaacgtactattgataaagatatgtcggatttgtgtacaaacgatgtcggatttgtttcttcattattttgcaaaaacataatatactaaagccataaccacccgggaagtgagaaacgggaggacaatgattgaaaggtgatgtaacaacaatgaaaagaagcaaaaaactgacgtccctgataatggcggcacttctgatgctttcagtgacggcatgcggtgagggcgcttccgggtcttcagaagcgggaaaggattcttcgggtgaaaacgtatcctcttcttccgtctcggctagcgatgacctattcgacgaaaacggcagatataaggagccggtgaccattacatacagcaaggtcatgtatcctggcgcgaaatttccggcagatcaatcgccggagcaaaactatatcaacgattttctcaaagagcgctacaatattgagatgaaacttgcttggagtgcggagggttccgaatacaataacaagctctccatcaatatcgcctccggtgaactgtgcgacctgatgttcgtggacaagtatatcactttcagacagatggctgagaatgatcttctggctgatctgacggagatataccccaagtatcgaggagagactttggagctggtagacaacagctttgaaaacagaaatattgaggcggtcacggtagaaggcaaacaactggctgttccgggaagcaatctgggctatggacagaatttgctgtggttgcgcaaggattggctggatgctctcgacttggaggtgccgaagacccttgatgaaatcgcggcggttctggaggcctttgtcaacgaagatccggacggcaacggacagaacgatacggtgggcttagttgtacaggcgacaaatcctgtgagcggctactctaacaactacggccttgagtccgtatttaacgcttttgatgtattcccgacccagtggatgacagacgatgagggaaaagtctactacggttccaccgatcccaagatgaaggatgctctgactctcttggccgattggtatcagcgcgggcttattgacaagcagttccccacccgcattggctccggtgagacggaatctctgtggacatcgggtaccgcaggagcaaagttcggaccgtggtgggctgttgccaacgaggctttcgccaatacccccgatatcgagtatgtggcaacagctgctccggtgaacagcaagggtgagttcaactatatgactggcgcgcccacaggaagtgtcagcgttgtaagtaaggaatgcgaacaccctgaggcggctattatagctttggcggccaacaacgagattgtgcgtggcacttatgacaaaaacgacgagatagcctgcaagtacggcgaacagggtcaggaactgcgcgtcagcggcgctgtagacgatgcgggtacaagaagcctgaatgtcttgggcactctcacttttgactatttcgacgtcgtgccgaagctcagcgcttgcgttaaggataacgtagtgaacggctcctacacggaatatccgggtatgacagattatgacaagagccagtgcattgtcgccaagaaatttgccgatggtgacaaggacgaggcgagcttctgggcttattggactcgctatgtaggtggcaatgttactgaggagggcaatcctgtctaccctgcttattactttgagacagaatcctccaccacattaaaggccgcgttggacaagctggaggacgagatgtatcttcagattattgtgggcgaaaagcctgtggactatttcgacgagtttgtcagccagtggaaggctttgggtggcgacactctgacagaagaagttcaggccatagtcgaccagggataatataaaaaattacctgcggagagggcgcgcctgaattatcagacgtgcccttgccgttttggtagattttcaaggaggctttatctagtgtataataagaaaaatgccaggtattatcacgtcatgcttttgccgggaatgatatttcttgtgatattctctatcatcccgatgttcggcattgttatggcttttcagaatttcgttccggcaaaaggtattttcggttcaaagtttgtgggactggctcagtttcagcgactgtttatgcttccggattttcggcagattctggagaataccctgataatcgctctgtcaaaaatcatcattggaacactgctggcaattgtgtttgcagtgttgctgaatgagtgcagaaacgtacggtataagcggttcattcaaacagcggtgtatctgccacactttctttcttgggttatactggcagtaatgttcagcaatatcttctcctataccggcataatcaatcagcttataacggctcttggcggggaaccggtgatgtttatgataagcaacacttggttccgacctattgtcattggtacggatgtctggaaagaattcggttataatgcggtaatatatgtggcggctatgaccagcattgacccctctctctacgaggcagcagacatcgatggcgcgggccgctggaaaaagattatgcatatcaccttaccgggaatacttcccacgataatactcatgggaactttgagcatcggcaatgtgcttaatgccggattcgatcaggtattcaatatgtattccccgttggtttaccgcaccggagacattatcgacacctatgtctatagggaaggtcttgtgaacatacagtacagcttcgcgacggcagtggggcttttcaagtctatcataagctttgctctattgactacagcatataagcttgcggacaagttctgcgggtacaggatattctgaggaggggattttatatgaagaatagaaaaacatcggggctccgaagaccaacggtgtcagatataattatcggggcagccctgctgttttgcgggcttatatgccttgtgcccatactcaacacggtagcgatttcctttagcgaccgcaccagcgccgctttgggaaaggttagcttctggcctgtgaattttaacttgtcttcatacaaagccatgctggaggagcggcagttcggtcagtcatttatggtgtctgtgttgagagtgatattgggaggatccatcaatatggtactttccatactcatggcgtatcctctgtctaagagccccaaagtgtttaaaagcaagaagttctatatgtggttcgtggtgttcaccatgatgttcaacggtggcttagtgccaaccttcatggtaatacgacagctgggcctgatggacacaatctgggctttggtactcccaacggccgtgccggtatttaatgtgatactgctgatgaacttttttaagaacatacccgctgccttagaggaggccgcctatgtggacggggctagcccttggtatattctttggcatatcttcgtgccgctttctaaagcttcgctggccacaatagctctgttcgcggtggtgaaccactggaacagcttctttgacggaaagctctatatcaattccctttcaaagctgccgctgcagacatatatccagtctctctcggctagtctggatccgacgcagatggcaactatgtccccggaggaaataaaggaaaagatggctatgtccagcctgacgttcaactcggcgaaagtcgtagtgtctatggtgcctattctgatcatatacccgttcctccaaaaatattttgtaacaggtattgtaatgggcgctgtgaaagagtaaaatctatagaggcggaaggaacggaggagtagtttatggaaaccaaagagtataaaaaaggtaagcttagttgtcagctctggagcggggagacaggcttgccgttgttagtggtgctggatgaaccggcgtacaaagctcgaccggagatattcatctctgagaaatttcaggagaaacacccttgctctgtgctgtgggtacaaagtgagaaaggcttgacggaatgggaacaaggacgagatcttcatacacttctctttgagttggagcaggaaacagacgaatgcagaatgtatctggtgggtggagctgctgcatgggccatcggctctcgttttcccagacgttttgccggcgttttggctcttggagggcgcggggatccttatatcgccagaaatatgaaattcacaccggtgtgggcttttggacaggaagaaccggaggacagaaaggtacccgcgtcaccaaagcatcttgtcgccgccgtgcgtacctgcggtggacagtacgtgaggtatacgagcgtgtcagagggggatatctggtcggcctgctttgaaaatgatgcggcagtggaatggctgttccgacaggacaggaaaaacatgtttgaggtgaagtatctttgccctggattgttccgtattgacgactattttacctcctctgcgtatctgatctgcggtgcagagaaggccttgctcatagacacaggccttggagagggcgatttgcccgcacttatcaagagtctgacgcctctgccggttgaggtggctgtaacccatccccacgaggatcatatggctcaagcgtaccgtttcccaaaaacttggcttcatcgactggacattgagtctatggaaaagaacagacagcagatggagaaggtctttggcagaaccctggcccccgccccgaaggatgaacagctttgccccattgaggacggcacgatgatagacttgggcggcggtgtacagattgagactgtggagttgggagggcatacgccaaactccgtagtgttcatagaccgggcacacaagtgtgtcttcacaggggatgccattggttcagggtttattgtgttgatgatttgcggcagaaacgagtggcgacaggtcatttcacattataaagaggagcttggccgctttataaaaagacttcctgagcttgaggacttcgcttggtacggaggccacttcattcaggagaatggttgcgatccggaccggcaggaggattatcttagtggccaatcctcgtattatctgccgctctccggggagatcgtaagggatatggaggagctgtgtgacaagcttctttccggtgagataccggaggagacaatactcgtgaacccaaaacactattgtgaatataaaagcgccggaatgacattcaggctaacggactaaatgaagcggctcaatatacgcctgaagtcaaagttcatgctggtgttctgctcgcttatgctgctttcggtagcgacggtattgaccacatcggtgtatgtgttccatcggtacgagaaggagctttatagagatacttctctggttctcaatatgagtgtcgattccatcgaacagaagctttccgctgtagatacagccagcagctatgtggtcatgggaaatgcggtgcaggatatattacaaaacgaggagttggatttttccaccagggagccggtttattcattcggacaagcctatcaggaattgaacgatctgcttttgaactattatggtcagctttcctgcgtacgttcggcggcggtctgtgtcaatggaaaaagttttggtataggggacgcttatgccatggagaatacgcttgtagaggagctcgccatggaggtcccaggggtcggtagcaaaccggtgctttatgagagcgaaggcaggcttttttatgtgcgcaacattgtgaacatgagagagatgaatatgcggtccttagggcttctggtacttcagatagatttgcagagtattgtatcggacagccttaagagtcggaaaaacctgaactaccagcctgatatttccatattctcaaaaaacggtgacgtgcttttcaccagtttcaccggggaagaagaaaaaattcagttccagcccaccgagaatggataccaaatctgccgcttggaagggcgtgactattttgtcagttacgcaacccactcggcttttgacttaagctacaccatgtacttacctttcgactcagtgactcgctccctgcggcttttaaacgccttgacctttgcagtggcagtgttggccatactggtgaatacactgttctgctcgaggtttgtatcccagataatacagcagtttaacatgctggtgaccaaaatgcacctatttcaggcggggcgctatgaggaacttgaccggtacagaagtaacaaccgcaaagatgaggtgggctatctcgaccgctcctttgacaagatggtcggagaggtaaaaagtctggtgaaagaaaactatctgacaaaaatcgccaaacaggaggctcagttgaagtccctgcaaaatcagatagatccccatttcctgtttaatatcctacaaaccatcaattggaaagcgaagacgggcaagcaggaggagatatcccatatcaccgaatctctggggaagatactgcgctacaccctttacaaaaaagaggccttggtacccttgcgggaagaactggagatagttgagggatatgtatccatacaaaagtacagatacggcgaacggcttagcgtgctgatagaggtgccaaagaaatggggcgaggctatgataccgccgatggctctgcagaatctgacagaaaactctataaagcatgcgctggagaatatgctggagccctgtgtggtaaaaatcggtgcgttggacagcggcgaggatttactgctgtttgttgaggataatggtccgggaataagcgaagaaacactaaaaaagctgaggaatccggtggaatcagacgaaggaattggtcttatcaatatcaaaaaaaggctttcactgctgctgggagaacggtacacactgagtgtatataacactggtcggggaacccgtgcggagatcttattgccgaagcctgaaaacgagaaggaacgtcgagaaaggaaataacaccatgctggatttactgctggtagacgacgaaaagagtgtgctggaagctatggcgaacacaatcaggtgggaaaactacggcgtacggttggtaggcacctgtgggaacgctatagaggctcttcacttcatggaaacttctcacttagatgtaattattaccgacgtgaaaatgccggtggtcgatggtatagagatgataaagcgggccaaggagatgggaatcaaggcagaatttgtcatactttccggtttcagtgagtttgagtttgcccagagagccatgagtcttggagtgcggcactatcttttgaagccttgcggagagaaggaattgggagaagtgctgatgaaggtgcagcaggactgtgcagaacgattgaaggccattccctcttctaatcccgaaaccgcagcgccacagaagaaacagcatttcgtggaagaaattatcgagtacgtgaaccagaacctgagcgacagccgtcttaacctgaagtggatagccagcaatctggttttccgcaatgaggactacgtgggaaaggctttcaccgcctacaccggcgaaaactttctgacctaccttaaccgacagagaatgcagagggcgaaggaactgctggaatcagagaaggagaacaagatatacgtcgtggcccaagaggttgggcttgggcacaatccgagatatttcagtaagcttttcaaaaaatatgttgggtgcagtccgcaggagtatcaggcaggaaagcggcggcagagataatgaaaaaggctcgtaggaatgtctgcttaaaccagccaaaagagaaacacatacaagtatagattgtcaaaaaacagccgcaacacactctctttttcgggtagtacaggaagtaacagggggtgaggtgtggagagggggagtgagcttttgcagccatttcactcctgcaaaagggcagaatttccctaaggcgtcccgttatcttttttgattgtgtcaatacagcgaatatcggttacaaaattcaagtgcccggaacaccgaattcatactcaaaacataaaaacagcgtttctattctttctttttagaaagttagaaacgctgcttttataatatgctaatttgctgtttgttgctgtcaaatgggttcttatctgcagaattttgaaggcgtatcataaacaaattaaaatgtgttggactctgttttttaatatcaaatctacgcccatttctacgcccaaatgacatgaaattgtgtgattttatatagaattatatgttggtgaaatttcagaaaactcagtaatcatgcgggtttacggacttatatgaaagtatatagatatatgaaaaaggtcggtctgcgacgatacctaatttcatctataaaaccatctttctttgaatgtagtcatgacgtaaactcatacacaatcagtatagcatattccccctgcgcctgcaagaaaattctgtgatttacaggggaaagtttttttaaatctgttgtggataaaatcaccatatcacgcccatgcagtagaaagcaaaagaaaatcatgttgcttcaagacgaactgcttttatagaatgaataaaattatatcaacaaaagtctagatactattgacaaataccttgctaatcagtatccttaaaacaagagttatcgtatattaaaccgatactttacagtttggggtgaagaacgatgaaacggattttgtccatggaattaaaaaaagcgttttggaacaagagatttttattttctttatcagtcgctctttttttatctttattaagcggctttttacaagtccggggatacatcatcagaacaaggtttctgaatacaccagcataccaaaatgttgctgactggggaaaagactaccacctcagcgccgagaccatggcagatttctggattggcatggatttttcaacctggtgcgccacggcatttttctttttactacccttgctggctgtcttaccttatggcagctcgctccaccgggaatacaaaagcgggtatcttaatttgatcacgccgcagatttcccagaagcgctattttgcggcaaagtttttggcgtcgtttctgtccggcggcgcagtgatcgttcttcctatgattgtcaacgtgatttttgtcgcctgtacggtgccgatgcgtctgccgtccgtattagaagtgatctataacggcgtatacgggtttgggttatgggcggaggttttttatacgcacccggttctttacattctgctctatctcttgctggattttctcttttccggcgcgattgccacaattcccatggcactttacaaactgaaaaacagaggactggtcttaattcttccgtttctcacgctgatggtttttcacattttcctttccctgctttatcggttcattcctttctgcctgtcgcctctcgatttccttcgcgcggtaaatgtttctccgtatggcgcaaatttgtggatcgtagccgcagagtttatactgcttcttcttccggggatgctcaccgttttggcttggagaaaaaaagatgttttatagaatttttgctttagatgtaaggcgatccttactcggcagatggaaaagattttcggttgcgctgctcttttttgttttggtgacttttgcgtgtaaaatcagcttttcaaacgcatacctgcaaagcccagagcttcctccttttgcaacgcctaccttgggggactttttgttgtatgcctttgggggttgcgatggcgtccgcagcgcaagtttatttgggtttgacagaccgtttgctattccttttcaatggcttttactgattttacttgccatatatattaactttgacttgactgaggaaagctctgcgggcgtgaatgtacaattacttcttcgtgccggtgataaaaagcaatattggttatcgaaaattctgtgtattactatcagcacaagcttgtattttatgctgggtgtgattgtgacactcgggtgcggttttgccttgggtggagtttcttctttagaaatagataagttaattttaaacgtgatgaacctttcttctatggttcctcgagaagccaccagccccgcttttattccgaccttgttgatggtatggtttgccattctaacgatcacgttgcttcagcagcttatttcactattcatcaaaccgattggaagttttttagtcatggctgtatttttgtttctgtctgcctattttatgaaaccttttttctttggcaattatgccatgatgattcgaaacgccctcctttgtgagggcggagtcgatgcggcggaaggcattttgattttgtcgcttgtcagtttagcatcgatagtggggggctgcgtcgtttacgaccgcaaggatattttaagcaagggggaatcctgatgtttcttgaagtgaaaaacgttacaaaatccattcacggcgatgttgtgatcaaaaacgtgtccctttgctccgagcgcgggcgtgtgatcggcctacgtggaattaatggttccggcaaaacgatgctgatgcgcctaatcagtggattgatccgccccacgaaaggacaggttttgatcgacggagaagtcgtatcgaaagacataccgtttccgagatccttaggcgtgctgattgaagggccggcctttttggatgattattccgccatggataacctgaaactcatcgcataccccaaaggaaaagtgacagaggatgagatcagggccgttttatcggaagtgaggctggatccgaaaagccgtaaaaaatacaaaaagttttctttgggcatgaagcagcgcctcggcattgcggcggcggtcatggagcacccggatttgattctgcttgatgaacctacaaatgcgctggatgaatccggtgttgacatgcttaaggacatcgtgaaaaaagaaaaggaacgcggcgcagtcttgatcgtttcctcgcatgaccgggatattctggaggatatatccgatgaaatttacgatttagagcagggagagatcgttcggcacagcataaagggggagaagcgaagtgaaggctaagaaaatcttactatgcgcagtcagtctggttttgcttctgctcatcgtcgtgcgcatcgtccatgtgaacaccaatgtattgacgattccggaagagcgctatgcgcaaaaccagtgggtagagctgaacggtgcctttcaggaaatggatgatgaaaacacggagggctattctgtaagaatactcggtgcggagcagctgacctacgatgaatttctggagaaatacggcgcgtcggaaaatcccccggagggaaaggacgatatagagactgtgctcgatgtagagtatgaatttcgcaatgtaggcaattcagacggctacctcctgctgatccaatacatgattgcagggccgtactattcgctgattttcgattcgaccttgtggtctgtatgcacgccgaccggtgagggacaactcgcgaccgccttgcaggaagataccacgtattccttccatgtcccgtacatttttgccggcggttttttctaaagacttggatggcgaaaagctcgccgctgtcgtttcacgcgtccctgtcaaaaaaatgattgaatttacgttgtgatctgcttaataaattaacaaaaagaaaacgggcttctgccgaattgccgcggcggggcccgtttctttatgtgtgaacttgcgatgtgtgcaatcttgttctcttatgcgttttcctgttctgcgagttttctgcccatgagcacgcccatgcaagaggccatcatcaggccgcgcgtccatccgctggcgtcgccaaggcagtgcaggttgtgaatgcttgtgttgaggtccgtgtccatcttcacgcggttgctgtaaaacttcagctccggcgaatagagcagcgtctccacggcggcaaagcccgggacgacgtgatcgaccgcctgaatgaagttgatgatattcaccatggcgcggtacggcatggcagaggtgatgtcgcccgccaccgcgtccggcagagaggggcgcaggttcgagcgagaaagctctttctgccacgtgcgcttgccgtccagaatatcgccgtagcgctgcaccaaaatgtgtcccgcgcccagcatattcgtcagctcgcccaccttctgcgcgtattcgatcggctgattgaacggctcgttgaagttgtgggagcacaaaatggcgaggttcgtgttatcggattttttatctttataggaatggccgttcacgacggcaagattgttatcgtaattttcctggctgacaaagccgcccgggttctggcagaatgtgcgcaccttgtttttaaacggcttcgggtagccgatgagcttcgattcatacagaacgttgtttacggtttccatgatctcgttgcgcacctctacgcgcacgccgatgtccactgtgcccggcgcatgggcgatgccgtggcgggcgcagagcttgtcaaaccaatccgcgccgcgtcggccggctgccacaacggtctgcttcgcgtaaacgtcgtattcgttctgaccctccgcaacgtgcacgccgatgcaggtgtcgttcttcaaaatgaggtcgctgcacgcgcagccgaagcgaatctccacgccgttattcagaagatattgctcgatcgcgtaataaatctcctgcgccttctctgtgccgaggtgacggatggggcagtcgacaagcttcaggccggtctggatggcacgcttgcgaatttctttgacggcttccttttcgctcacgccctccacgcgcgtgtccgcgccgaactccagatagatggaatccgtgtattcaataagcgactgtacgacgtcttcgccgatcagctgaggcaggtcgccgccaacctccgggctgagggacagcttgccgtccgaaaacgcacccgcgccagaaaagcctgttgtaatatggcagtacggcttgcagttcatgcagcggccggtctgggccttgggacatttgcgcgtttcaatggaacggcctttttccagcagcagaattttctccttgctgccgcggcgcagaagctccatcgcggtaaaaatgccggcaggaccggcgccgatgatgacgatatccgtgttcatgtttgaccccaactttctaaaactaacagatgaatttgcgtatgaatttcaaaatacaactttatgcaaaacccggtttcgggtaaatcggcacataaaaaggccgccctgtgcccgaacgtatacacgaagcccgtaagcggcttcggtatagtcggcacacaaggcggccggtagagacattcacccaagtcgtgaatttatatgaccgatcagcaattcagaattatagcagctaattaaacttctgtcaagcttttttgcgcataaaaatgcaggcttttgcaaaatatcttgcaaatttacttatttggtgaacttctcgccgttgtaaatgaagatgcccgcgcccgcgccggtctttttgccgtccagaagccattttttaaagcagcggcgctgggtggtgtcctccggcagctcgctgttcggcttctcaaagtcctttgcgaacacacgccacttgtcgtggaacacatcgtattcctcgctgtcgtaaatatagaagtcaccgatgaaatcgaccatattgagcgtctcgggcagaatttcgcggttcttcgggaacaaaagccaggagtggcagcggaataccatcggcttgccatcgaggtcttttttgtaaaattcgtaggcttttttataagattcaatgcgcaccgcgcggttcaaagaaccgcaggacggaatgtgcatgttgtaaaccgtgtcaccgggctttaccgtgtaaccgccgaccgtcacgggcgtgtcgccggagaagtgtacggcctcatactgcaaacggcccagcttaaagcgatgcatcgtgtagaaccacgggtaccagcttgcgacgaatgtgccccaaatgccgtatacgtcgtggcactcgatgagcttgaattttaggtcggcgatggtgtcccagaacagctcgtccgtcaggcccgccgctctgtaattttcgcgcagacgttcgcttgtaagcgcaaggaacaggaaatccaccacgtggcggtgcagctctgtccgctccgaaagcgcgtccatgtgcggcacaatgggctcccattccgcgccgtatgcgccgtcaatgccgtaatctttaaaaagcagtgtctcggcagagaccagctcgtcaatcgcgccgggtgtcgtcacgagcgtctcgcagttctcgcgcagagaagcgcggctcgcttccggcagatcaaggttttcaataaaacaatttaaataatcgagtgtgtacatacagatcctcccaaagtagcgtttttccatagaaacgcgtttatctcattctatcatttgtatatgcgcgacgcaatggactttttgcacagcagaacacacctgtttttgtagaaacggtgcacagcacctgtttttgcacggttttctccgctaacgctcaaaatacaatcacctttttatcacattttgtaagtaaaatttaagaaacaaaacaaaaaggagggcgaaagccatggcggactataccggcatatttgagcgcgtagagcaaaaatatctgcttgattccttacagtttgaggcgctctgggcggttttagagccgtatatgcgccccgatgaatacgggcgctccaccatatgcaacatttactttgacaccccgaattatttgctggcgcgactttcgggcgaaaagcccgtctataaagaaaagctgcgtttgcgtacctacggcgtgccgaaagtggaaagcccgtcgtttgtggagctgaagaaaaaatatcagggcattgtctacaagcgccgcatcgtgatgccctacggcgaagcatatgactggctcgtaaacggcaaagcgccgaaagagaacagccagattgcaaaagagattgcatggtcactgcactattacggcgatttaaagtccgccatggcgctgtgctacgaccgtgtggcactttacagccgcgaagacagcggcctgcgcatcacattcgataccaacatacgctttagagaggaaattaccgacctgcgtcagggggacgacgggcgactgctgttagagcccggcgaaacgctgatggaaatcaaaaccggcggcagtctccccacatggctcaccgatatgctgagccgctttagaatttaccccgcgtcgttttctaaatatgccagcgcctataacacccacggcacgcacatcgtgcatgcatcctaaataattcatttgatttctgaaaggatattcccatggaaaccatgtttgcaagcttcacctcgtccggtatcaccgtatcttcgtttttgatttgctctctcgtcgcgctgctttgcggcgcactcatcgcgtttacgtatacgcgccgcatgcgctttacgcaaagccttgtgctcgctgtcattttgctgccgtttgccgtgcagaccgtcattatgctcgtcaacggcaacgtcggcacgggcgtcgcggtcgccggcgcgttcggccttgtccgtttccgctccgcacccggtaacgccaaagacatctccgtcatcttcgttgccatggccgtgggtctcgcctgcggcagcggctatatcgcgctctccgtgctcttcacggtcattgcgtgcgccgtgctgtatctgctcgttttcttccatatcggtgcagaccgcagcggcgaaaaagagctcagcatcaccatccctgaatcgctcgattacaccgaggtgttcgacgatattttcaaagaatacaccacccacgcagagcttacggaagtcaagaccgcaagcctcggtagcctctataagttgcactatcgcgtgcgccttgcggacgaccgcaacgaaaaagaatttctcgatgcgcttcgctgccgcaacggcaatctcgaagtgcgctgcggccagccgcatactcccgtggaacagctgtaaggaaaggagccttcctttatgaaaccgaatcgtttatccacgaaaaaacacaccctgcgctttgctgtcattctctccgcactggtcttaacgggttgcgcctccacacagtcgaccacatcgtctacgtccgcgtcttccgcttcctctaccgtgagcacggtcagcacctctgaggaaagcggtgcagacgagaccgattctaccggcggcgcgatgaacggcaccatcggctccgtcatcgaagcaaatctttccttcaaaaataaggatttctacatcgattacagtgcggaagataccgtgaagatcgacctttccgcgccaaaggaagcagacggcgttaaggtttccggcagtacggtcaccattacggaagcgggcacgtatgtcctcagcggcacgctcacggacggccaacttatcatcgataccggcgacgaggatgatgtgcgtcttgtactcgaaaacgcgagcatcacctgcacaacgaccgcgcctatctacgcgaaaaacgccgataaagtcattatcagcctgcccgaaaacaccgaaagcaccgtgaccgataccgtcaccggcacggacggcaacgatgagcttaccgccgcgattttcgccaaatgcgacctttccgttaacggcacgggcacactgaacgtcaacgccaacgcaaatgacggcatcacgagcgaagataaattgaaaatcaccggcggcgttttgaatatcacttcggcagacgacggcctcgtcggcaaagacgctgtgctcatgaaggacggcaccgtccatatcacggcttccggcaacggcatcaagtccaccaaatccgaggccgatcaaggctatgtctatatcggcgggggcactgtgaacatcaccgccaagcaggacggcattcaggcggagaccagtgttctcatttccgcgggcgaagtaaatgtcaccgcaggcggcggcgcgaatggagagcaaaaaacgggcaatgctatgtttggcggcgcacagaatacaacgacggacgaaactctgtctacaaagggcatcaaggccgaagccgcgctcgacatcaccggcggcaccgtcacggtcgattccgcagacgacagcctgcacagcaacgattcgatgaccgtttcaggcggcggtatcaccgtaaagtccggcgacgacggcctgcacgcagataacacccttacgatcgtggacggcaccatcgtggtggaagagtcctgcgagggccttgaagccatcgacctcaccatcaacggcggtacgatcgatgtcaccgcaagcgacgacggtctgaatgctgcaggcagctccgttgacggcggctttggcaccgcgggtgcagatacgctcaccgtcaacggcggcacactcaccgtaaacgcctccggcgacgggctcgattccaacggtgcgcttacgattaacggcggtacggtgtacgtcagcggccccaccggtgacggtaacggcacatttgactgcgacggcgtgtttaccatcaacggcggcgttgtgctcggcacaggcagctccggcatgctgaagacccccacagcggattccaaacagaacacgatcagcgtcagctgcaccggcagcgcgggtgacaccgtagaagtgaagggcgcagacggcaacacgctcgtttccaccgtggctccgaagaactttacgaatgtcatgttcagcacgccggacatcaccgagggcgaaacgtatacagtctatgtaaacggtacagaagccgcgagcgagacctgctccggcgttgtcagcggcgctacgggtatgggcagctttggcggcggccccggcaatatgggtggtcaggctccaaacggcggtatgggcggccaaatgccgaacggtaacggcggtacgcctccgcagatgccgggcaacacctccgatacctgattttctcttgttttcctgtgcgtcaaaatatgaacttttcgtaacaatttcggctttttcgcaaaaacccgcacaccttttgtcaaggtgaaaaggaacctgtcaatttccgtcgaaaacgcgcgaacgattctatttgaactttcaagacccccttgctataatggcattactgacagatttaccacccatccgacagcctccgctctaaaagtacagcggggctgccgggccggatcaggaaggatgagagattttgagtgaacaggaattgatgctgcgcgtagcagcaaaacacggcgtagacggtgaaacggtccgcgaggagattggcaaagcccttcgcacggcgaagaattcttcaaatgccgcagcccgcgcgttttggagtgccatccccgaagatgccagcgacaaagagatcgtgcagtgcatcgccgccctcttgttgggtagcgccgtgcaggagcaaaactgaacagcattatccgtaaactcaaaaaacacggtgcagccgaaatgaagctgcaccgtgtttttgttgttttgcaaaatcacagagataaaggtcgcgcttttggcttggcttaaaacgaccggttcgtgccttgtcacgatatcctctatctttttctcggtctcctgtccgcgaatagcgaagtaagagtttactttattactcttgcccttacaaccggcgaaagtgccgccagcttttcgcgcacgtcctccgtcacgtcgcccgtaacgtccaaaatggtgtatgcccagtcgccacgcgatttcgagagcatgttctcgatgttgatgcccgcttcaccgcacacctgtgtgaacgaaccgatggtatttggaatgtttctgtgcgcaaggcaaatgcgtgtgtccgcaccgcgcgccatggaaatattcgggaagttgacggcatttcggatgttgccgttttcaatgtaatccttcagctcctctgcggccatcacagcgcagttatcctcgctttccggcgtggaagcgccaaggtgcgggatcgcgatgacgttttcgaccccgagcagcgcgtcatccgggaagtccgtcgcatacgcggcaacggtgccgtctgcaagcgccgccaacatcgcgtcggtatcgacgagcgccccgcgcgagaagtttaagacgcgcacaccttttttcacttttttcaaagcgtccgcgcctatgagtccgcgcgtcgagtcatttagcggtacatgtattgtaatgtaatcgcacttttcaaaaatctcatccacggaagcggccttaacaatgtcgctcgaaaggttccatgcagcgtccacggaaaggaacgggtcgaagccgtatacctgcatgccgagtgtctgtgcggcgttcgcaacgagcacgccgatcgcgccaagaccaatcacgcccagctttttgccgagaatttccggccccgcaaacgcggattttcctttttcaacctgcttcgaaatgtctgccgtgccttttagtgtctgcgcccattcaatcgccgggacaatttttctcgacgtcaaaagcagtgccgccagcaccagctccttcacggcgttggcgtttgcgccgggtgtgttgaacaccacaatgccggcttccgcgcacttttccacgggaatgttgttcacacccgcgcctgccctcgcgattgcaagcaggctattgggcaattccatgtcgtgcatggcggcggagcgcactaaaatgccctccgggttctcaatttcggcagcgtatgtatagttttcgcccaaacggtcggtgccgagcgggctgatcttattgaggcaaagtatgttgtgcatcaggcattctccttttcaaagttctccataaactgaacaagcttctctacgccctcgcgcggcatcgcgttatagatagatgcgcgcataccgcccacgctgcggtggcccttcagattcacaaagcccgcagcggcagcttcctgcacgaattttgcgtctaaatccttgtcgcccgtcacgaatgtcacgttcataatggaacggctttctttttcggcgcagcccttaaaaagctttgagcggtcgaggaaatcatagagcagcgcggccttttccacgttgcgtttttccatcgccttcagcccgcctacttcgtttttcagccattccaaaacgagcttgcacatgtaaatggagtagcacggcggcgtgttgtacatgctgtcgctttccgcatgcgtcttatacatgaacatcgtcggcgttttttcctgcggctcgccgatgagatcctcgcggatgataacaatggtcaggcctgccggggctacatttttctgcgcgcccgcatacaaaacgccgaatctcgaaacatcgatcgggcggcttaaaatgcaggaggaaatgtccgccacaagcggcacgtcacccgtctccggcagcgcatggaacaccgtgccgtagatcgtgttgttcatgcagatatggaagtagtccgcgtccgggcggaactccttcgggtcaaggtcgggaatacggctgaaattctgctctttcgaggatgccaccactttgcaatcgccaaagcgcgcggcttccttatacgcttttgtggagaactggccggagagtacatagtcggccttgcggtttttcgtcatcaaattcagcggcaccatcgcaaactgcgaggatgcgccgccctgcaaaaagagcaccttgtagttatccgggatctccatcacctcgcgcagaaggcttcccgcgcccttgatgatcgcgtcatagaccttagatcggtgtgacatctccatcacggactggcctgatccttcatagtcgagcatttcggcggcggctctcagaagaacgctttccggcagcatagaggggccggcagagaagttgtacacacggttcatagtaagatcttcctttctttggcgcgttaaatcgcaccggataataaaatagatttgccttgctttaccgcggtttcttatagcatcatggtaaagtttcccctattatacatacagcaaaacgcaaatgtcaagtataaatttgtttttggaataaaaacaggtgtatctaatcggtggacagatatcgaatgctgcatttcgttcgtgccccatgcacaaatacaaataaattgtccaccttctgctgacaagcccgcatttttcggccgcaaggcaaaaaacgcggcaaaaaaacactttaaaaactatctaaaagtacagaacattttccataacggattgattttttggaaatctttttgtataataacagaaacaaggacactttaggctcaaaaagagcaaacagacccgtgtccgaactcggcgaaagggtgaagctttcatgaaggtacagaatattgtcaacattttaaaggcggaaatactggcggagggcgaccttcaggaagaggtcaaaaccgcatgcggcagcgatatgatgagcgacgtgctggcgttcgtcaaggatcagtccgtgctgctcacgggccttgtcaatccgcaggtggtacgcacggcggaaatgatggatatgcactgcatcatctttgtgcgcggcaagcgcccggatgagaccgtgctgtcgctcgcacggcaaaaggacatcaccatcctcgcaacgccgtacagaatgttcacggcgtgcggcctcctatacgaaaacggattagaaggcgggtgtgacgtatcatgagtatgctgcaacttcggtattcagtccccggcgatgattttacccgcgcgggcgaagcttcgggcgatgtaaagcataaattaaagaaactcggctataacccatctgccattcgccgcgtttccattgccatgtacgagggtgaaatcaacatggtcatccatgcgggcggcggcgaagccaaagtggacgtggacccggataaggttgtcatcgtgctcaccgatcacggtcccggcatcgcagacgtggaaaaagccatgcaggagggctggtccaccgcaccggataacgtgcggtcgcttggttttggcgccggcatgggcctgccgaacatgaagaagtattccgacgaaatgacgattgattcggtcgtggggcagggcaccacgctcaaaatggtcgtttacgcgcagagcgaaaaatcgtaggctctgcataggataatggaggaggcgcgttagattggggatttttttccactcggtcacgctcgatgaaagcaagtgcgtaggctgcacaaactgcatcaagcgctgcccaacggaagccattcgcgtgcgcagcggcaaagcggtcatcatgagcgagcgctgtatcgattgcggagagtgcatccgcatctgcccgcaccacgcaaagcgtgcaaagcatgaccacctttccatgcttgaaaagtttacatataaaatcgcgctgcccgcaccgtctctttatgggcagtttaataatttggacgatcaggattatgttttatccggccttaaaaagcttgggttcgatgacgtcatggaggtctccggcgcggcagagcttgtcagcgaggctacccgccgtctgatggatgccggcaccttgcagcgccccgtcatcagctcagcttgcccggctgtcgtgcgtttaatccgcgtccgcttcccggatctctgcgaccacgttctgccgcttttgtcgcccatggagactgcggcaaggattgcaaagcagcaggccatgcagaaaacgggcctgccgaaagagcagatcggctgctttttcatcacgccgtgtcccgcaaaggttacggatattcgcatgcccatcggcatcgaaaagtcggaggtagacggcgccatcgccatcagcgaaattttcccgcagctttcaagccgcatggataagcttacgccaaaagatctcgaatcgctctcaaattccggcattatcggtgtcagctgggcgacctccggcggcgaatcctcggcgctgttaaaagaaaaatatctcgcggcggacggcatcgaaaacgtcatccgcgttttggaggagattgaagacgaacgcatcggcgagctggatttcatcgagctcaacgcctgctccggcggctgcgtcggcggcgtgctatgcgtcgaaaatccgtatgtcgccattgcaagattgcaaagattgcgcaaatatctgcccgtctcgcagaatcacttggagaaaaacaaaaccgtcccggaggaaatgaactggggcagcgggctggagttttccaatgttttaacgctttcggaggatatttcccgcgccatggaaatgatgatggagatcgacaaggtggaagcggagctgccggggctcgattgcggcgcgtgcggcgcaccgagctgccgcgcctttgcggaggacaccgtgcgcggaagctgccgcaaggaagactgcgtgtttatcctgcgcaaggagatccgccgttttgcggattcgctctcaaatttagaccttgacggcggcaaacgcacaagtgatgacgaatagggggaagtaaaatgcagataggggaaatggccgaaacactcggctggaagcttttgaccgaaaacacagatacaacgcgcgaagtaaagggctgctactgcggcgatcttttaagctgggtcatgggcagagccaaagcggacgacgcgtggcttaccgtcatgggcaacgtcaacgccatcgcagtcgcatcgcttgccgataccgcaggcatcatccttgtagaagatgccgctttggatgcagatgccaaagcgcgtgccgagcagcaggaaatcgccgtgtacggcacatccctgcctgcctttgaaaccgcgcttaaaatcgcttcattactggggtgaatgtatgaacagctatcggtacgacctgcacctgcactcgtgcctttctccgtgcggcgatacggacatgacgccgaacaacctcgtcaatatggcggcgctgctcggctgcgacatcatcgcgcttacggatcacaatacttgccgcaatacgcccgccgcggtaaaggtggggcaggccgcggacgtgctcgtcattcccggtatggaactctgcaccgcagaagaagcacacgtcgtctgtctgtttgaaacggtcgaggacgcgctcgcgttcgataaatacgtctgtgcgcacattccaaaggtgccgaaccgcccggaaatttttggcgagcagtggatcttaaatgaggacgacgagaagatcggcgaaatttccgagcttctcattaccgcaacagacatcagcatcaacgacgtgcaggcgctcgtgaaaaagtttaacggcgtggcgtttcccgcgcatgtcgataaagacgcgtacagcgtcaccgcgtcgctcggtgctatcccgccggaagcgcagttttccgcagcagagctgtcccttactgccgatgccgcacagcagcggcttctgcacccggagctcgaaagcatgatgcttctgcgcagctctgacgcgcattacctgcatttgatgcccgaagaacaccaaacggtggagctgccggaaaaaaccgccaaagcgcttttagatgtgctgcgtggatgcggtgtaggtaagtttcaagctttataagaaaaaaacgccaagctgtgtgctatgcgaatttcgcataacgcacagctttcgtcatttttaccaacatggctaaatcatcgaattttcgttaaattgcataaaatttcgttaaatctcgctcttttgaaaattagctgtttctaactcgtgcaaattggaagaaaacggaatagatatacttttatcgatataaaatatcgataaaatgagtgatatttcaaccttttcacggcaaatctatactgtttttgtatacttttacaaatgcccgaaaacgaaatttttgtgctgtacgctaaaagaactgacaaaaatttcgtcatgggtttgacaaactttcgtttttaattcttttttagaattattacgtatgtcgattttgatataattcataaagatgtatgaaagttctccgcccaataggggcgcagaccgaaccatacctgaatttaaacataattttatcagggaggaaataaaatgcaaaagcgtatcagtaccattccgtttaccgatactcccgagcagcatgagaagctcctcgcagtcatcgagagcctcaagaatgaaaagggcgccgtcatggctgcactgcacaaggcgcaggatatctacggctacctgccgatcgaagtgcagaaggagattgcacgcggtctcgatgtatctctcgaagaggtatacggcgtttccacgttctattctcagttctcgctcactccgaagggtaagtacaacatttccatttgcctcggcaccgcatgctacgttaagggcgcagataaggttcttgaccgtctcgttgcaaagctcggcatccagccggaggaatgtacgccggacggcgtgttctcgctcactgcatgtcgctgcatcggcgcctgcggccttgcaccggtcctcaccgtcaacgaagacgtttacggccgtctcgttcccgaggacgtggataagattcttgcaaaatacacagcgtaagccatgcgtgagctttcgctgaatgtgatggacattgtgcagaactccgttcgcgcgggcgcatcgcttatcacggtgcaggtcgcggaatcgaaaaagcacgacaccttaaccatcacgataacggataacggctgcggtatgagtgcggagcaggtcaaaagcgtcatcgatccgtttttcaccacacgcaccacccgcaaggttgggcttggcgtgccgcttttcaaaatggaagcggaaatgacgggcggctcgtttcagattgattccgaagaggggaagggcaccaaagtcacggctgtgtttcgtccctcgcatgtcgatatgatccccctcggggacatcgcgtccgttatccatcttttgatcacctgcaatcccgaactcgattttctctttacccacagcattgaagaaaaagagatcaccctcgatacccgtacgctgcgcgagcagctggagggcgttccgtttacggagcccgcggtatcggcgtggattcgggaatatcttgcagaggcggaggaagagcttaagtagctctcgtagtatcaatgcgcaaggcgcagaaaggaaaagccatatgaaatcattagctgaacttcaggcaattcgagatagagcaaaaatggcggtcaacgtccgcgaaaattccgaagcgaaaacacgtgttctggtcggcatggctacctgcggcatcgcagcaggcgcaagaccggttctcaccaccatctcggatgaggtcaataaacgcgagcttcacgacgtcctggtcacgcagacgggctgcatcggcatctgccagttcgagccgatcgtcgaagttatcgatgaaaacggcaccaagactacatacgtaaaaatgacaccggaaaaggcactgcgcgtcgtcaacgatcacatcgtcaacggcaatgtcgtcacggaatacaccatcggtgcaaatcagaaataaggaggtaaaactatgtttcgttccaatgttctggtctgcggcggtacgggctgcacgtcctcgaacagcgaaaagatcattgaaaagctgaaggaggaaatcagcgccaaaggtctggatcaggaagtcaacgttgttcgtaccggctgcttcggcctgtgcgcactcggcccgatcatgatcgtatacccggagggcgcgttctatagccgcgtcaccccggaagatgtcccggaaattgttgaagagcacctgctcaagggacgtatcgttcgccgcctgctctacaaggagacggtcgtcgacgaaagcactacaaaatcccttaacgagaccacgttctacgcaaagcagatgcgtgtcgcactgcgcaactgcggcgtgatcaacccggagcagatcgacgagtacatcgcgctcgacggctatcaggcaatcggcaagattctcacggagaagatcccgccccagcaggtcattcagaccatgctcgattccggcctccgcggtcgtggcggtgcaggcttccccaccggtcttaagtggaaattcgcagcggcaaacgatgccgatcaaaaatatgtatgttgtaacgccgacgagggcgacccgggcgcattcatggaccgttccattctggaaggcgatccgcacagcgtcatcgaagccatgaccatcgccggttacgccatcggcgcaacgcagggctacatctacatccgtgcagagtaccccatcgcggttcaccgtctccagattgccatcaaccaggcgagagaatatggcctgctcggcaagaatatcttcgattccggctttgatttcgaccttgagatccgcctcggcgccggcgcattcgtatgcggcgaagagactgcgcttatgacctccatcgaaggtaagcgcggcgagccgagatgccgcccaccgttcccggcactcaaaggtctgttccagaagccgaccgttctgaataacgttgagacgtatgccaacatcccgcagatcttcctcaaggggccgcagtggttccgcagcatcggcacagagaagagcgcgggcaccaaggtgttcgcactcggcggcaagattaacaataccggccttgttgaggttccgatgggtaccaccctgcgtgaagttgtcgaagaaattggcggcggcatcccgggcggccacaagtttaaggctgcacagaccggcggtccttccggcggctgcatcccggcgtccctcatcgatacgccgatcgattacgacagcctcatcgccatcggctccatgatgggctccggcggcctcatcgttatggatgaaacgacctgcatggtcgatatcgcaaagttcttccttgagttcacggtcgatgaatcctgcggcaagtgcaccccgtgccgtgtcggcacgaagcgcctgcttgagatcctcaacaagattacaagcggcaagggcacactcgaagacatcgataagctcgaagagctctgctactacattaaggaaaactccctctgcggtctcggccagacagcgccgaacccggttctttccacactcaagtattaccgtgatgagtacattgcgcacgtcaccgagcatcgttgcccggcaggtgcctgcaaggccctcacgaattacgtcatcgatgcggacaagtgcaagggctgcacgctctgcgcacgcaactgcccggtcggcgccatctccggcactgtccgtgagccgcatgtcatcgatacgcagaagtgcatcaagtgcggcgtctgccgtgaaaagtgcaagttcggcgccatcgaaaagaagtaaggaaggaagttgagaatagcatggatatggtaaatattaagatcaacggcatgtcctacgaggtcgctgccggcagcacgatcctcgaagccgcaagagaagccggaatcgacattcccaccctttgcttcttgaaggacgtcaaccagatcggcgcatgccgtatgtgcatggtcgaagttaagggcgcaaaatcgcttgttgccgcctgcgtgtacccggtaaacgagggcatggaggtcttcaccaatacgccgaaggttcagaaatccagaaaaatgacactggagctcttgctctccgtgcatgaccgcaaatgtctctcctgcaagagaagcggcacctgcgagctgcagaagctctgcaacgatatgggcatcgacagcgagaaccgctacgaaggcgccgttcccgccggcaaaaaggattacagcaccctgcacctcgaaagagataatgcaaagtgcatcctgtgccgccgctgcgtggcagcctgccagcagcagcacgtcgccgtcatcggcgcgaacaaccgcggtttcgataccgagatcggctgcgcatttgagatgccgctcagcgaagtggcctgcgtttcctgcggtcagtgtatcgtagcctgcccgacaggtgccctcaccgaaaaggacaacacccagcaggtcatcgatgccatcaacgatccggaaaaggtcgttgtcgtgcagacggctccggctgtgcgcgcagcgctcggcgaagagttcggtatgccgatcggcacgaacgtagaaggcaagatggtcgcagccctgcgccgccttggcttcgataaggtctacgacaccgatttcggtgccgatatgaccatcatggaagaagcaaacgagttcattgaccgcgtgaagaacggcggcaagctgccgatcatcacctcctgctctccgggctgggtcaagttctgcgagcactacttcccgagcctcacagaaaacctctccacctgcaagtccccgcagcagatgaccggtgcgctcatcaaaacgtggtttgcggaaagagaaggcatcgatccgaacaacatcgtttccgtttctgtcatgccgtgcgtcgcgaagaaattcgagatcaaccgtgacgacgaagacgcagccggtgtgccggacgttgatatctccattaccacccgcgagcttgcccgcatgatcaagatggcacagctcaacttcgcaagactgccggaagaggattttgacccggttatgggtgtttccaccggcgcagctacgatcttcggcgcgacgggcggcgttctggaagcagcgctccgtaccgcagccgatgtgcttgagggcgtcgaccacgataacatcgagtacaaagagattcgcggcacgaagggcttcaaggaagctgtttacaaggttgccggcatggatgtcaaggtcgctgtcgtcagcggtctgaataacgcaaacgagctgctcaagaagatcgaaagcggcgaagccgactaccacatcgtggaagtcatgtgttgcccgggcggttgcgtaaacggcggcggccagccgattcagccgtctacggttcgcagcttcacggacattaaggccctgcgtgcaaaagccctctacgatgaggacgcggccaagacgctcagaaagagccatctgaaccccgtcgtcaaggagtgctatgaatggatgggcggcgagcccggctgccataaggcacacgagctgctgcatacgtcttacgtcaagcgcgatcgtttctaaatttaaatttaaggtgtttaagagccactgcgagtaatcacagtggctctttttatgtcggctccctctgacagagggaaaggaagtgatacagcgtgctaatgaacttcacggtacctttcacttagaaaaaaactgtgtatataaaaagagcggcgcaaagccgctctttcagggaacccatgcaactgggttccctacaatttgaacgtcccccggacgttcaaatctaccttcctagttttgagttaggcaaaagtattccgaactctgcggagttcggcttagggctcagccctaagaatccgcgaccttttttgaaaaaaggtcgatcaaaaacttttaacccacgttttgcgtcatcactgtgctaccgtttccaacagctcgcaaatatctatggctgcattttgattgataactgctctctgccgtttgcgcatttcttctgcatttcccggctccgaaagcctttccaccgccgacaaaagctctgcttctgtgttttccacctttacggcgatgccctccttggcaaaaaactccgcgttgcggctttcgcaccccggtatcggcgaaatgtgcacaagcggcacgcccgccgcggcgctctccgtagatgaaagtccgcccggcttcgagataaatacgtcgcttgcctttaaatacagtgccattttgttcgtgctgcgcattggcgtgatttgccctttttttgcaaattcagtttccacgctgtcaaacagcgtctcattgctgccgcacaaaatgttgaggtcgcagtttgcattttgcttcaagtacggcagaagtgcccgcacggcatttataattgatcccgcgcccatgctcccgccggaaagcagcagcgtgcgcctgtctttcggcaagttaagcgcttcccgcgctctgtctttcgtgatggtatcatcggaaaaatccagccgcaccgggatgcccagcggccgcaatttttccacaggaatgcctcgcccggtgaaatcgctgctcaaaagcggggagggcgtcacgtacaagtcgcagtccgattcctccgtaaacggaacgcaagtgtagtccgtcgcaataaacacaaacggcggcgtttccatgccgtttagccgcatgtgcgtcagaatctccgccgggtacaaatgcgtgcagacgatcacgtccgttaggtgttccgcaaggtatttctgcatgtacggcgccatttttccgttgatgtagtacaccggcgagcgtcccggcagcttacggtacgcgttgccgaggtcatagaccgcgccaaacagcttcgggcttttctgtaccaactttatataggtctgcccgactttattcgcaagttcctcgctcaccagcgtgtacgggtccatgcgcacggcatggtgcccgcgttccgtcagtgcttcaaaaaccgcttgcgccgccgtgttgtgaccgccgcccgtgctgcaggatagaatcagtgcttccatgcaagtttcacctcaaagtgttctttttcctcggcactcataaagagcttcgcgagcaccgaagctgcaatcagcaaaaagccgaagacgatatagcggtttggctccagccaaaccgtgcaaatggccgccaggatatacgtcgccactgtgcggtaatagttcgggttgattttaacaacgcacgaaaagaaaatgaagatgcccgccaaaacgcacagagggatccagtgcggcagcagccccaaaaagcacccaaacgttgccgcgatgcctttgccgccgtgcttaatgtcataaaacggcagaatatgtcccaaaaccggcgccgccatcacaaaagagagcatcagcgggttttcgggcagttctccgctgcggtacaaaaagaccgggaaaaagccctttaacaggtcgccgcacaacgtaaacacgccgcaccagaacccgccgtatgtaaacgcattcattgtgcccgggttcttgtccgggctttccgccataatgtctgtctttttaaagatcagcccaccgagccgcgcaaacaaaatactgcccagcagatacccgaaaataatatataaagcgtcgcgcacttccatgtttttcacacactccccaaaaatttcgcgccacaaaaaaattcacaattttgccgagagtctcgtcttgacaacctcttataaagtcattataatatgaaccattgacacttgtcaatttgacatttgtccaagttaagtgaaaatattgacgaaacaggagggaatgtctatgtatcagggaaaaaatccaacggcgctgcaatcacagaacctcatcacagaggcacttttagcacttatggaggaagagccgtttcaaaaaatcacgataaaagccgtttgtgcccacgccggcgtttcacgccagacgttttactcgctgtttgaaaataaggaagaggtcattgggcgtcggctcgaccagctttttgaagaataccgtaaacggttcattgaggaaaagcgcgcttacaccatttgcagtctatgtgattctattatggagtgttttgtggagcagaaaaaactcctcagtcttctggtcgaaaatcatctggatacattggctcgcgaaaaatcggaagcgtatctcctgcatttggacaatatttttcacgcttatgaccacgaagaccgtgattatgccatttcatttcttgccggcgcgatcatcagcatggtggtttacgctattcgcaaggatgattttacggatagccgcaaaatttcgaatcttgtgcaaaagatcattaccggccaatattttacaatttaaatccgaaaattcctataacaaaaaccgctcgggctttacggcttcgagcggttttatattacaagaaagattatttgtggtagagattattgtcctcatacgttgcttcgcacgtcacgttgacgccaaggcgtttgaatacgctgtcgtctaccgtgccgaggattacgctggagtgcaaatcacagccgctcagctcgtccagcttctgcatggcgcgcatcgcgttttcgtcggtcgccgcgctgatggcgagcgcaaccaacatctcatcggtgtgcaagcgcgggtttcggctctgcatgtagtcggttttcagcgtctgaataggcgcaatgaccgtcggcgagatgagcttcacctcgtgcggaatgcctgcaagcatcttcaaagcgttcagtgtcaacgcagaggaagcacccagcaattccgatgtgcgccccgtcacaatcgtgccgtccggcagctctaaagctgccgcgggctgtcctgtcgcttccgcgcgcttcaatgctgcgagcacgaccgggcggttctccggctccaacttcagctggcgcatcaggttctcgattttctgtaattccgcttcggaagcaagaccctggcgcacaaggcacgccgtcttaaagtagcgacgaataatctcctgcttcgaggcttcgcggcacacttcatcgtcgatgatggacaggcccgccatgttcacgcccatgtccgttgggctcgcgtacgggcactcgccgtaaatctgctcaaacatcgcgcgcagcacggggtagatttcaatgtcgcggttgtagtttacagttgtctcaccgtacgcctcaaggtggaacgggtcgatcatattcatgtcattcaggtcagccgtcgccgcttcataggcaaggttcaccggatgctttaagggaaggttccaaatggggaaggtctcaaacttcgcgtagcccgccttaatgccgcgtttgtgctcgtgataaagctgcgaaaggcaggttgccattttgccgctgcccgggcccggcgccgtcaccacaacaagggagcgcgtcgtctcaatgtagtcgttgcggccgtagccctcgtcgcttacgatgagcttcacgtcggaggggtaccccggaatgcggtactggcggtagaccttcagccccagtgtcttcatgcgctgctcaaaaatcgccgcggagggctggtctgcgtactgcgtcagcgtgatgctgcccacatataagccgaagccgcggaaaatatcaatcaaacggatgacatccgtgtcatacgtaatgccaaggtcgctgcggcgtttgtttttctcaatgtcgttcgcgttgatcgcaatgacaatctccgcctggtctttcagcgccaaaagcatcttgatcttgttgtccggctcaaagcccggcagcacgcgtgaagcgtggaaatcgtcaaacagcttgccgccgaattccagatacagcttgccgccgaactggtcaatgcgctcgcgaatacgcgcagactgcagctcgatatacttctgactgtcaaaaccgattttcttcatggccattccccttccttaattcatacgtctcatgcgtcctaaaataagcccctttagggtgcatttgaaaagccgtaaacttgttttccgatacaccctgaatacagtaaaaaagcgggcgttcggtatctgcccgcgaaaaatctgtttttagtatagcaaaaaacgcgctttttttcaatagcaaatcttggtttgcgccgcctaatttcgactctcttccgcgcgagatattgtcagtatcttcaaaaagtggtatactgtttattaaatcgaagtttaattttaacggcggtacagggagacacttttcatgagcgagcagaagcgaaacacaacgaaaaaccaaatatgccttgggcttttggcgcatgtcgatgccggcaagaccacactttcggaagcgatgctgtatgaaggcgggcagctccgccgtcttgggcgcgtcgatcatcaggacgcgtttctcgataccgacgtgcaggagcgcgagcgcggcatcaccattttctcaaagcaggccgttttaccgctcgaacataccgcgtttacgctgctcgatacccccggtcacgtcgatttttcaagcgaaatggagcgcacgcttcaggtgctcgattacgctgtgctcgtcatcagcggcacagacggtgtgcagagccacacgcgtacgctgtggcggcttttggagcgctataacgtccctacgtttctcttcatcaacaaaatggatctcgacggcgcagaccacgataaagtcttagccgagctgcaaaagctcagcaccggttgcatcgatttcacatctcccgaagcggaacgcgatgaaaacatcgccgtttgtgacgaagacacgctcgcccattacctcgaaacgggcgaagtcgaatgtcccgagattaaacgcctcatcaaaaatcgcaagctttttccgtgctggttcggctcggctttgaagttagacggcgtaaaagaacttctaaacggtcttgaaatgtacaccgaaatgcccgaataccctaaggctttcggcgcgaaggtcttcaaaatcgcacacgatcatcagggcgcacggcttacgtatttgaaggtcacaggcggcgctttgcccgttaaaatggtccttaaaggcggcgcgggtgaaaacgtatgggcagaaaaagccgaccagctccgcatctattccggagggaaattccgccttgcggaggaagtcaccgcgggcggcgtgtgcaccgtaacgggcctcacgcacacgtatcccgggcagggactcggtgcggaggaagacacccctgcgcccgtgcttgaaagctttttgacgtatcaggttttcttgccggacggcatggagccgcataccgccgtgcgctgtttgcgcgttttggaggaagaagacccccagcttcatgtcgtgtggaacgagcagttacacgaaattcacgtgcagattatgggcgcggtgcagcttgaagttttgcagcgcgtcttaaaagagcgctttaaaatggaggtcacgttcggcaccggcagcattgtctaccgcgagacgatcgaagaacccgtcgaaggcatggggcattttgaacccctgcgccattacgccgaggtgcacctgctcttagagcccggcgagcgcggcagcggtatgcgtttcggcaccgtgtgcagcatggatgtgcttgaccgcaactggcagaatctcattttaacgcaccttgaggagcgcagctaccccggcgtgctgaccggctcgcccatcacggatatgaaaatcacgcttctcatcggccgtgcgcatttaaagcacaccgagggcggcgattttcgtcaggccacctatcgcgccgtgcgccacggcttattgcaggcgaaaagcgtgcttttagagccgtggtacgatttccgattagaggttccgcagtcgcaggtcggccgcgccatttcggacatgcagcgcctttacgcggagttcgagccgccgcagaccgagggtgaaaacgccgtcatcacgggctttgcgcccgtctccgaaatgcagggttacaccttggaggtcgcatcgtacacgcgcgggcttggcagccttatttgtatgccgaaaggctacttgccgtgccataatgccgaagaggtcatcgagcatatcggctacgatgccgagcgtgatttggagaacaccggcgattccgtcttctgttcgcacggctccggcttcgttgtgccgtggcgcgaggcggcttcccacatgcacctcgaaagtggatggaagcccgaaaagccgggaacaaaatctgccgaaaccgaagctcccgtgcgcgccgccgcacagctgccgcctgtgttcgacgatgagctgcgcgccatttttgagcgcacctacggccctatccgacgccgcgatatgcagcctcaaaacgccgtccgcgccgccgaaagcagcggaaaaggggagtggaaggtgccggaaaaggtcttcgagcctgagtatctcctcatcgacggctacaatattctctttgcgtgggacgatttgaataaggtcgccgaaaaggacatcgacaccgctcgacagattttaatggatagaatctgcaattatcagagcttcagccgcagcacgtgcatcctcgttttcgatgcctatcgcgtcccgcgtgacgtggaggacgttatccgctaccacaacatttccgttgtattcacaaagcaggcggaaacggcagatacctacattgagcgcgccacgtttgagatcggcaaaaagcaccgtgtgcgcgtcgccacgtccgacggcgcagagcagatgatcgtactcggtcacggcgcgcgtcgtgttacggcctccgaattcaaggtggaggtcgatgaagcgaacaagcgtatgcgcgaggtcatcgccgattggaacgaaaaagaaagcgcccgccacgcgcataagcctttcaaaaatttaacggatcaaacgcagagtaatctgcgtgcgtatacagaaaacaacaaaacacaaagaaaggaaaatggaaaatgaaagtcttactcttaaacggaagcccgaaggcgaacggcaatactgccgttgctctgcatgaaatggtggatattttcaacaaagaaggcattgaaacggaagttattcatgtcggcaataaagacatccgaggatgtgtggcatgcgggcaatgttctaagctggggcactgcgtttttaacgatcttgtcaacgaagttgcgacgaaatttgcggaagcggacggtcttgtcgtcggcagtccggtgtattatgcctccgcaaacgcaacacttgtcgcgcttttgacgcgcctgttttacagcactccattcgataaaacgatgaaagtcggcgccgccgttgtggctgcccgccgcggcggcctttccgccacgtttgacgaactcaacaaattctttacgatctccggcatgcccgtcgcgtccagtcagtattggaacagcattcacggcctcgcaccaggcgaggcgaaagaggatttggagggtctgcaaaccatgcgcaccttggcgagaaatatgacttttttgatgaagagcattgcgctcggtaaggaaaaatttggcctgccggaaacggaacagcacatcgcaacgaactttattcggtaaaaaatacggctaaagcagcaaagaagcacagttaagcgacaaagagcatctttgctgatttttcaatatcctctattaaaaatataaatttatccgcaaaatggcaaaaatctcccatggcaaaaagccaagggagattttgtttatagatcaacttctaatatatttaagtttatttccagtcgcctgttccggcttcgacgtagcgggacttctcaaatacggagatcatcaaggtcggatcggtcgtgccgagatcggaatatgtaagccccagcgccgtgccactgcttttatcctgccactcgagatattgagtgccggtactgttgtcgtcttgaacggcaggtgcgccgaaggtttcggtgaagcgtttgcttgcggcttcaaaatgctcttctgccgtgccgcgcgcaagctgttcgtggaacgttaccgaaaacagcttgccgttttcgtcaaactgcgcatcaaatttgccggagcagtctgcggactgcacgatgtcctccgataaataattcgtatatgcgaaaggcgctgtcgcggggctttcgctgaccattgtcagcttagagccgatagcggattcaagctccgtcgtgtcgatgccgaacggcgcagtggaatacgcatagccggtcttggaatcgaatcggaaagcgtctgtctctttcacggttgtcttagacgaacagccgacaaatgtgagcatcaaaacaagggacaaaaccaatgcgagctttttcataaaacgacctcctatgatgatgttaggatttgtgcctgcgctgacggatacggggtgcaaatgaatttgtgttatgaattgggtttaaagtttttgataaaatatatcacctccgagtataatttttggtagtatattacacctgcatgatatcatgtataggagggtttgtcaatatatatttaaaaattgttagaaaaaaaataaaacaaaaaatctccctctgtgctgaaacacaaagggagactgtttataatgctttgattttagagcaagatcgaattagagaatgatgctcttgcctgtcatttcttccggctgcggcagatccatgatcttcagcatggtgggtgcgatgtccgcgagaacgccgccctcacgcagcttgcacggataaccgacaacgcagaacggaaccgggtttgtggtgtgtgcggtaaacggttcaccgtcatcgtcgaccatcttgtctgcattgccgtggtcggcggtgatgagcagcacgccgcccatctcgtcgatggctgctgcgaccttgccgacgcaggtatcgacagcctcaacggcagcctttgcggcctcgaacacgccggtatggccgaccatgtcgcagtttgcaaagttcagaatgatcatatcgtacttgccggacttgacggcctcaaccatcttatccgtgacttcgtaagcgctcatttccggctggaggtcatacgttgcgaccttcggggacttgacaaggatgcggtcctcacccggatactgcttctcgacgccgccgttgaagaagaacgtgacatgcgcatacttctcggtttcggcaatgcggagctgcttgaggcccttatcggagacgtactcgccgagggtgtttttaaggctctgcggcttgaatgcgatctcaacgttcggcatcgtggcgtcatactgcgtcatgcagacgtaggtgagcgggaagaagccattcttgcgggtgaagccggtgaaatccgggtctacaaacgtgcgggtgatctctcttgcgcggtccgggcggaagttgaagaacacgacggaatcgccggatgcgaccggagcgccgcccttgatgacgcacggcacgacgaactcgtccgtgacttcattttcataggatttcgatacagcgcaaaccgggcacgcgaactcttcgccttcgcggcaaaccatggcgttgtaagccttttctacgcgctcccagcggttgtcgcggtccatcgcatagtagcggcccatgaccgttgcaaccttgccgacgccgatttccttcatcttctccatgagctccttgacgaagtccttgccggaggaaggcggaacatcgcggccgtcgagcagggcgtgaacatagacgttttcaacgcccatcttttttgccatttccagcagaccgtagaggtgctggttgtggctgtgcacgccgccgttggaaagcaggccgatgaggtgcagcgcggtgccgttttcttttgcgttattcatggcgtgtacgagcgcttcattctcaaagaaagaaccgtcctgtaccgccttcgtgatgcgggtaagctcctgataaacgatgcggcctgcgccgatattggtgtggccgacttcgctgttgcccatctggccgtccggcagaccgacgtccatgccggaagcgccgatctttgtaatcgggttttcagagaacagcttatcgaggttcggtctcttagcggcggcaatcgcgttgccctccgttttagcaattccgaaaccgtccagaatcatgagtacaacaggtcttttcatagtggagatgcctttcctttcaactggaaaaaatctttcggtggaaaaatcagcccttggtggctgcgtctacgatggctgcgaagtcgttcggcttcagggaagcgccgccgatgaggccgccgtcaacgtccggctgtgcaagaagctcagctgcgttgcctgcgttcatggagccgccgtactgaacggtgatgccttctgcagccttttcgccgtagagagacttgacggtcgcacggatgacagcgcaaacttcgtttgcctgctctgccgtggcggtcttgccggtgccgatggcccaaaccggctcgtaagcgatgatgatgcgcttaagctcttcttcggttacgccgccgagtgcgatctttgtctgcatggcaacgagctcatcggtgatgccctgctcgcgctgctcgaggtactcgcctacgcaaacgatgacggtgaggcctgcgtcaagcgcagctcttgttctcttctgaaccgtaacgtcggtatcgccgaagtaggttcttctctcgctgtggccggtgatgacgtactcaacgccgcaagccttcagcatttctgcggaaatctcgccggtgaaagcgccgctgaccgcccagtggcagttttctgcgccgatcttgatgttggtgcccttagccgcctcaatagcggttgcgatgtctacatacggcacgcaagcgacaacgtcgcagcctgcgtccttaacgagcggagcaatggcggtgatgagttcctttgcctccgcaggggttttgttcattttccagttgccggcgataacagcctttctaacagccttgttcatgattttctattcctttccgtcggttaaaaaccgtttttattgagacaacaatacgggagcagaggcaagctccgctcccgttcatgcttttgattatttctcgttgaggcaagcaatgccggggagctcaagaccctcgaggaattcgagagaagcgccgccgcccgtggagatgtgcgtcatcttatccgcgaagccgagcttctcaacagccgcagcggagtcgccgccgccgataatggagattgcgttgctgtctgcaactgcctttgcaaccgcgatggtgccgtttgcgaagttttcccactcggaaacgcccatcgggccgttccaaacaacggtgcctgcgttcttcacggcgtttgcgaacagctcacggctcttcgggccgatatcgagacccatccagccttccggaatgtcgtcggaatcgacgatcttccactcggagtctgcactgtactcggttgcaacaacgttatcgaccgggatgaggaagttgatgcccttagccttcgccttgtccatcatttccttagcgagctcaaccttgtcgtcctcgcagatggaggtgccaatctcgtgaccgagagccttgaagaaggtgtaagccatgccgccgccgatgatgagtgtgtcgaccttttcaatcagattgttgatgacgccgatcttatcggaaaccttagcgccgccgaggattgcaacgaacggacgcttcgggttctcgagcgcgccgcccatgatggaaatttccttctggatgaggtagccgcagacagccgggaggtaatctgcaacgcctgctgtggaagcatgtgcacggtgtgcggtgccgaatgcatcgttgacatagatctcagccatggaagcgagtgccttagcgaaatccgggtcgttcttggtctcttctgcgtggaagcgaacgttctcgagcatgaggacttcgccgtccttcagagctgcagccttagccttagcgtccgggcctacaacgtcttttgccatgatgacttccttgccgaggagcttggaaagctccgctgcgacaggtgccagggagaacttcttcacgtcgcccttagcagcttcgagtgccttagcggtcgcttcggcctgctctgcctccggcatagcgtcgatcttcttcttctccttcttgtcgagctttacaacgtcgttgaagatgttgtgcgggcgacccatgtgggagcagaggatgacctttgcgttgtggtctacgagatacttaatggtgggcagcgcaccgacgatgcgctttgtgtccgtgatgacaccgtccttcatcgggacgttgaaatcgcagcggacaagaacgtgcttaccggcaacgtcgatgtcttctacggttttcttgttgaggtagttcattttcgtacactcctttaagaaatatattgagttacggttatacgtttggttggcggacaacaccgcctacagaatttattttataccaaacggaagatgatttcaagagataacgcgcaaattgcacactttttagcgcaaatttttcatttttgcgattttgtacgggtttttatttcgcaccgttcgcgtctgccgcgtcccagtcgtagccgcgcaggcgaccggcttcggaaagcgcgggaaaatcccactggcgcaggacttcgtaaacgccgatggcgatgctgttggagaggtttaagctgcgcgcttccgaaatcatggggatgcgcacgcagcggtctttgtttttgaaaagcaggtcttccggcagaccggctgtctctttgccgaagaagaggtagcaattatcgggatagtgtatatccgtgtgcttatggacggattttgtggagaaaaagaaaaattcgccgctgttttttgcaaaaaattcgtcgagcgagtcataataggtgatgtcgagcaaatgccagtaatcgagaccggcgcgctttagctttttgtcgtcgattttaaagcccatggggcccacaaggtgcagccttgcgcccgtggcggcgcaggtgcgcgcgacgttgccggcgttttgggggatctccggctcgaccataacgatattcaaaatcattgctgtcaaagtcctttcgggaagaatgatgtatgtttttgtaaaaagggggaaactaaacgtgacggctgttttgtatgttttaaaagccgcaatctggatctggaggtttgatgccatgtataagcagagcatgaacgttgtgaagggcgtgggtctcggcattgccgcgggcgctgccgtggctgccgtttcgtctgcgatgatgaacggcgggaagaaatccgccaaggcgcgcacaaaagagatgcgccgcagcaccgccaaggccgtgcacacggtggggcagctcattgacggcgtagagaatatgttgaagtaactacccgcggtcgcagtggcagcctaaaacgccgctgtggccgaatacatagatgttgcatggcgtgcggcgctcgccggcggctgcggcgcatttgagcgtcagggagccggaagcgggctgctcgtagcaccgttgcagccggttgcagcacccgcccgcgatatcgcgccagcggcatgccccggcgtttgtacagtgcttgatgcactccatatcgatgtagcgctgggaaatttcgccgcccgcgtggtaatcaccgttggagatgagcaggtgcgcaacggcgaggtcgccgataacgtttgaaaagtggctttctgtgccgtggtgcggcgctttgacgatatagtagccgtcaaacagcttcccggagatgcggcgcagcacttcatcggacacgtcgccggtcattagaatatcgaggttcgacgggccgcggcttcggcggttgtgaaagacgagggagaggtcgttctgcgtttcggtgtagacgttgcgcacgacggattgatttaaaatgtcctgaatatcaggcgcggcgggggaatgggcgaggttgctgcgcatatcctccatgcgacctaagaggtcgcggagagaatcaagcaggatgcgccgtctgccgggcgtggcgcggtcggacggcgcgaaggccgtttgacactgcatgtagagcctaacgaacgcatccttcgtctccaaaaactccgtttcgcgcccggtgtgaaacggggaagagaggcagatgttgaggttttcgacggcttccgtcaggatggcatcgaacgggaagggctcgttacgcgcgggggtgagcacctcgtaaaacgcgccgtcgaacgtgaaaatgtcgccgccgccgagcgtgaaaatgcggtctgcgccgacagaatcattgagcgcgtcgaaaatacgcaggcaggcggtgttcacctgcgcgaagtcactttgcggaacggcgaaaaaatgcgcgaacacggcgaactccaaaacgggatttacgccgtgcttatcgcacgggagggcggggaggtatacgcggtcaaagtagccgggatcctttttgacttgctttaaaaagccgctcatgtggtcacggtggtagtgcgtgagcagaaactggcgctgggcggcgggcgcatagcggctgaaaatttcgttaaaacggcggtcaatctcctcttcaccgcggcgggcgtagcggctgacggagccgcagtccaccattaaaatctgccggttttgcccaacgaggacggtgcagtcgccgtattccacgtcgtgcagttcaacgcggtccattacgctttgtcctcgttctgcacgtggcggtacaaaatgccgttttcatagcggtcatctttccactcgccggtgtagacgacattgccgtttttgtcgaacgccgtgccgtgaccctgccgtttaccgttctgccagccaccggaataaatcaagttgccgtctgcatcgaacagggtagcttgacccgctttttcgttgttttcatatttttcgacgaatacgcagtgcgtttcggggtcgacggagacacctgcgccctgcttttggccgtcgatgatttggccgttgtaaattaaatcgccgtttttattgaaaatcgttgccatgccttgcggcttaccgttttgccagtgggaaatgtgcaacgcgtggtcgctttcgcggaacgaaacgccgaagccttcgcgctgatcgtctttgaagtcgccgatgtaggagacggcgccgctgcggtagtggtgcacgccgaacccctcgcgcaggtcgtttttgtactcgccttcataaagcgtgatgccgttgttgttcacggtgcggccgaagccctcgcgtttgccgtcttcggaaaggtcgcctgtgtaacggagcgacgcgccgcctctgatgagcgtgatgccgttttctgggtcgtcctctttttcagtttcctttgcaggcaggagcttatcaagcagggcacgtgcctgccggagttcttccggcgtgatgtcgggggcggagtctgtttttggcgtttctacgggagcaggttcttccggggcttcttcgggttcttctgcgggagtgtcctcaatgagggcttcttcgacttctttcggctcgggttctgtttcgggctgcggctcggcttcgggtgcttcggaggcagctccttcggaagcgggttcctcttcggtaggctctgcggctttttcggcggggtcgctcaggaaatcgacaagtgcaggctcggtgaggttcccgaaaacgggcaactcgggccccggctcggtcgtttcgggcacatcgccgtctttgacctcccaacccatggagagcatgacggaggcgtttttattctgcttcagaaatttgatgcggcgctgctgctcttcacgcgggcagtaggcgtattcgccgcgctcatcggcgacgagcagaaggcggtcgccgaactgggcgttttgcaaactctgctcggcagtttggaatgcatacggcacggggaacagcacggtttctttcgttttgccggtggaatcgttataatcgaagcggatgacggcatcgcggtggtcgtccggcttaaaggtaatgcgcgcgcggcggtcgtcatcgggagagaaatactccgtacgcatccactgcatttcaccatcgtagtacacgcgggcgcgcaatgcgccgtaggcgttataaaacgcgatgccgcgctgaccgccgtttgtgaatgcggcttcgagcgtatttttgcctgcgcgttttttccattttatagtgcggcgggagagcttgccgtgcacctcgccggaaagcccgtcgaaaatgccgcgggcgcggatatgtacggttttgccggatccgaaatagctgcggcgcgcttcataaagggcatcgtgaaacgaagacagggtatcgagcccggtgtagcacacgatgtagaccttgcggttcacaaggcttgcgctgagagaagtggcgttatgttccgtcatctgaacgacctttctgcgggaaacgtgcctgtttcccgtcttttccgttgatatagtttcagtataccacgaaaggacgtttatttcaatcacacggttccttcggattttaacttgcgaaatgctttaaaatctgctatgatattgtatcatcgttctatactataatagaggaaaggatcgcgcggcatgaaaagtgtgaagaaagaagtctcgttcaggcgaaaactgatgacggctgtattgagcgtcacgctgccgctgatcgcgctgcttttgttcagcaacctgtattccacgcaggcatttaacaggaaaattgcggattccaacatgcgcacgatggattaccgggcggggcgcatggaggagcagctcgactctgtgaacgattttctcaccgggttgacggtgagcgacgattaccgcacgctgtcgggcggtgagaaaacccccttaaaggcgtatcttgcaagctatacgctcattacgcagttgaaaacggcgctgccggcatacggtgatgtgggcgcgtttttcatttacagtgcgccaagcgatgccgagcgcgatatttttgacgattctatctcctacgcgcagaaggagcggctgcgcgcttttgtgcgcgacgcggtggagaacaacacgtattcgtacaatatgcagtggcggcacgcggagatcggcggcaaggcgtatttattccgcttttacggcgggcgcggcacgtatcttgtggcgatggtgccgttggcggcgctggcggacgtgcgctacatgcagattgataacgacgcggtgatgttgttttccgacaaaaacaacgagccgctgacctcagtcgattttgtggaggaaaacaggatcgatttgaacggcgactatgagaactactttatttcgggcgggaagcagcggtatatgatcgtgggccgcgatttggcgggtacggattgcagggcgatccttgccgtaaacgaaagcgggtatttcggctcgcttgatggcttgcaggcggcgctgctggtgctctctttgctggcgctggtgctgattccggtcattcagtggcggctgacgagctccatctcgaagccggtggaggggctgcgcaatgttatggagcatatccgcgccggcaatctggaggcgaaggctgagggcaagacgaatatacgcgaattcaacgaggtgaacgagacgttcaacacgatgatgacgcagattaaagacctcaagatcgaatcttacgagcacgagattgagacgcagaaggcggagctgcgttacatgcagctgcagatccgcccgcatttcttcttaaattgccttaaaagcttatatgcgttggcggaagcaggcaaatatgaccgcattcaaaaaatgattttggagatctcgaagcacatacggtatatttttacggacagcatggagcttgtgccgctttcgcgcgaattagaccacattgaaaattacatcgagatgcagcgggggtcttcgcagtacccgccggtgtgccggtttgacattgacccgcgtttacgggacttgccgatcccgccgctttctttgcagagctttgtggaaaactgcgtgaagcatgtgtactcgccggattacgttttgaaaattgaggtgaaggcagcggtgctgcgcagtggcacggacacgtttgccgacctgacggtgacggataacggcggcggcttccccgaggacgtgattgcggagatcaacgaaccggacagcccgctgtacgcgcagaaccacgtgggcatcaacaatgtgaaaaagcgcttgcagctgatttacggtgaccgcgctttatatgcgttctttaatcgggatatgggcgaacgcatgggcagtgtatctgaaattttgattccgatagacctcgcaatgctgcatgcggcagaggacgagccggacggagaggaggctttcaacggatgaacgtattgatcgtagatgaccagccggaagttgtggagagcatggtgaccggtgtaaactggaaagaaatacccgtggagcaggtgtttacggcgtacagcgtgaaggaagcgcaaagcgtttttgaacgcgagcgcatagatgtgctgctgtgtgacattgaaatgccgccgacgaacggctttgctttgctgcgctgggcgcaggagcggttttccggcgtggtgtgcattttcctttctgcacacgcggaatttgaatatgcgcaggaggccgtgaagcttggcagctttgactacattttgcagcctgcgccgtatgcggagattgaggcggcggtggagcgcgcggccggaaaagtgcgcgaagcggaaaaccagaggaggtacaatgcttatgcgaagtaccgtggcgaggacgaaagtgcggaaaaggagccggacaagacggagcagacaccgatacagcgcgcgatgacgtatatccggcgaaacatcgacaaggatttaagccgcgcagagattgcggacgcaatctatttgaacccggaatacctttcccgtttatttaaaaaggaaacgggcgcctctttaaatgattatattgtgacggagaagatgcgcgcggcacagtctttgctgagtgacacaaacatcccggtgagcctcattgcgacgaaggtggggtactcgaatttctcgtatttttcgcaggtttttaagaaatacacgggcatgtcgccggtggaataccgtgcggcaaagcggcggtctaagctgtaaagcacgttttctttcggtaaactgttgtaaaactgtcacaaaatgtaaaatccgtgtaaacgggtgaaagacagaaaatacatcttgcatttgagagagggacacccatatgggttttcctctttttttatcgatatagagtatcgatatgcaggattgtaaaaagcatcctgcaaagtcttcacaaacatgtcacattttgaataggagatgtcacgaaatttgcagaaaagatgcggattttctgttactatatgtgtgtaatttgaccgcgaaggctaaaaataaatttatcgcgggtcgaaaagtatgaaaggaagtaagaaaatggcaaagagacttgtagcaatgctcatggcagcagcgctgaccctctccctggcagcttgcggcaacggcggttcttccagctccaccgcagactccagcacatcttccgaatcttccgcttctgacagcgctgcagctgatagcagcgatgcctcttccgaagcagaagatctgaaagaatccgaacttgtaactctcaatatcgtgacgatgtcaggcggtaaagaagaatccggtatcgcacaggttgaggaagcaatggacaagatcctcgaagagaagttcaacgtgaacgttaagctttccttcctcccgtacagcagctatgctgaccagatttccctgatgctttcctccggcgaaggcgttgaccttctcccggtttacatggtcaactacacggcttgcgctgattccggtcagctctatccgatggacgacctcatcgagaagtacggccagggcatcattgagcagctcggttgggacaacatcaactgcggtcgcgtaggcggcgagctgttcggcctcacggagggccgtgaccttgcagcttcccagggctttgagtacagactggaccttgctgagaagtacaacctcgacatggattccgttaagaccctcgaagacctccacgatgttctcgttaccattaaggaaaaagaagaaaactgctggccggtagctgtttccgccggcgaaaacatccgtaactggggttgggactctctgggcgacgagatggttaacctcggcgttctccccgacatggctacggacaccaccgttgtgaacctctacgagaccgagcagtacaagaacctcgttaccacgatgtacaactggatgcaggaaggcctcattcaggctgacgctgtgaacaccaccgagactgcaaccactctgatggacgcaggcactgcattcggcagcttcgttaacctgaagccgtactatgcagaagagaacaacgcgaacctccagaacccgatcggcacggttgagctgattccggcactggcttccaccgaccgtgttaccatgggtctgtggtccatcgcaggcagctgcgagcatccggaagctgctatgaagactctgaacgagctttacagcaacccggagctgagcaacctctacatgtacggtattgagggcgttcactacgaagtaatcgaggaaggcgctgttacgaacggtcaggacagaatcaactatccggacggtcttgatgcaacgaccaccacttacagaaagtccggtacttggctgatgccgaaccagttcatcggcgacatctggggcaccgatctcccggctgattactgggatgcaacgaagaccttcaacgaagagtctcagaagtccgcagcattcggcttctccttcgacgcaacgcaggttgcgaacgagatcaccgcttgcacgaacgttgttaacaagtaccacaaggcactcgtttgcggcgctcttgacccggaaacgactctcccgcagttcaattctgagctgaaggatgccggcatcgatgcgatcatcgaagagaagcaggcacagctcgacgcttggctggctgagcagaagtaatttacttcacaattagacttaaagaagctggagcgagattcgtttcagcttccttgtgaaaatccgtgtctttttcccgaaagggaaaagggcatgggcgtgtacagagagatgacccttctgtacatgcccatgttcttttggaaaatttcaacggagcaggacgaaaacagattgaaaggggtttctaattatgccgaataaatctgccgcactggaaaaagaaatgaaagtgcgctcggcaaaaccgaataagtggctgcgcttttaccgctgcatcccgctgtatctgatgttccttccgggcgccctgtatctgctcatggataagtatatcccgatgagcggtctgatcatcgccttcaagaaggtcaactggcgtaagggcatccttgcaagtgactgggtgggtttcagcaacttcacctacctttttaaaacgaaggacgctttcaacattacgcgcaacacactgctttataacctgtgctttatcgtgctgggcaccgtgattgccattacaatcgcgattctcttaaacgagattacaagcaagctgttcaagcaggtgtaccagaccatcattctgatgccgtacctgatctccatcgttgtggtcagctatctggtgttcgcaatgctgagttctgaatccggctttatcaacaacacgatctttaaggcacttggcattaatccgatttcctggtatacagagccgaagtactggccgttcattttggtcatcgtacatatttggaaggtgttcggctacgactgcattctctattatgcaacgctcgtcggcattgaccacggctactatgaggcggcggtcatcgacggcgcaaaccgctggcagcagatccttcacgttacgctgccgagccttctgcccaccatcatcacgctgacactgatgtctatcggcaagattttctattccgatttcggtctgttctatcaggtgccgatggattccggcccgctgctcgacattacgagcacgattgatacgtatgtttaccgcgccctcatcacgctgaacgattacggcagatcttccgcagcaggcgtttaccagagcgttgtcggctttatactggtcctgtgcgcgaaccttgccgttaagaaaatcggcggcgaagagaacgcactgttctaaggaagggagagagaaacaccatggtcgaaaaaaacaaagggtttcaggtcggcgcacacattgtgatgatcatcctttccctgtgctgcatcttcccgttccttctgctcatcgtgtcctccattacggacgagcaggaattgatccgcaacggctacacgctgttcccgaaggcactcagtctgaatgcttaccagtacatgtttaagagcagcaacaagattatctccgcgtacggcatcacaatcctctccacagttgtgggtacggtgtgcggtctttccatgacaatcctcatggcttacccgctttcccgccgcgacctgccgggccgcaacggtcttgcgttttacgtgttcttcacgatgctgttctccggcggtcttgtgccgacgtacatcatgtacacccgttacatcaaggtgagcaacacgatttgggcgctcatcattccgtccctcgtggtcaacgcgttctacgtgatcatgatgcgcacgtacttctccacgaacatcccggaagctgttattgaagcggcgcgcattgacggtgcgggcgagttcagaatcctgctgacgatcgttctgccgatgagcgttccgatggttgcaacgatgacactgcttatcggtctttcctactggaacgattggaaaaacggtctctactatctccagcagaacaagagcctttacagtatacaagttcttttgaatgacatgctacgagacgtgcaggcgctgaagagcggtatggatgctgcggctgcggctgagattacggcgaacatgccgagcacgggcatcaagatggcaatcgccgttgtcggtgttctgccggtgctcatcgtttatccgttcttccagaagtacttcgttaagggcatcacgatcggcgctgttaagggctgatttgatcaatccgatattctctttgccaacataataatagaatgacaaaaatcaccttcgcggttttcctccggcgagggtgattttgttatgtacgggtattttgttgcggtcgttgttttatgtgttttcttcgtttaagtcctgtaatctaaggccggcagtgccagtgacgggcagggaaaagacgatggctttcgctttggtctcaagcccggcttcctgcataatagcagtcatgacgttgtttttatccgcgtgctttacgacgatgagcacaagctctttttcactggcgagggaaacgccgaggaacttttccgcgccctccatgccgctgcccttcgcgtggatgacggtgccgccgcctgcgttttcgcggcgcgctgcggccataatctgctcggtatagccctggtttgcgatgacgaccagaagctcgtatttggtatctttcaagacgctttcctctcctttctgaaacggctgaccgttcgttaaaaactccagctgacgtttgccgccgatactgctgagcggcatggtgaacgcgatgccggtgccgggaatatcgatgagcatgatggtctgcagccccttttgcacggcactccagaccttgccggtgacaacggaaagcagcacggctttttgcgtggcttcaagtccgaaatcgtttagaatttcggacgcggcggtgcctttgccgagcgtgctgagcacgacctcgatcccataggttttataaaatgacaggaatttctggctttggttgcggtctgtaatggtaatcatccagtataaattgtcgcccataaacgccctcctttacagttcgatgatcgcgttttcgtccatatcggcgaatgcggcgggtgcggcggtctccgttttacggcgctgcatgagctttgccgcgaggcccatgacctgaatggtgatgagcggcgtcatggcgaccatggcaacgacaccgaaggcatctgtgaccatgttgccgccgacggccgtgcacgcgccctgtgcgagggggagcagaaacgccgcagtcatggggccggaagcgacgccgccggagtcaaacgcgatggcggtgtagatcttcgggacaaaaaacgagatgatgagcgcgagcgcatagcccgggatgaggaaccacaaaatcgaaatgccggtgaggacgcggatcatggcgagcccgagcgagatggacacgccgacggaaagcccgatgcccatggctttggcggagatggcgccgtctgtgatctcctcgacctgacgattgagaacgtacacggcgggctctgcgcgaacaatgaaatagcccatgaccatagcgacgggaatgacgacagcggagtatttataggaagctaactgctgcccgaggtaatgaccggcgggcatgaagccgacatttgcaccggtaagaaacagcacaaggccgatgtatgtataaacgaggcccatgccgatctggaataatttgcgcttagaaagccgcaaaacaagaaactgcgccgcgaggaaaaagagaatgatcggcaggagagagacggcaatctcgatgaggtaggtcgggataccggtgcggaacagctcgaaaagctccgaggaatcctgcatttcgggcaggatgggcggcgtgtaggtgctttcattcggattatagatgatgccgaggatcatgacggccaaaatggggccgatggacgagagcgcaacgaggccgaagctgtcgtctgccgcgtggcggtcgctgcggatggccgagatgccgacgccgagcgccatgatgaacggcacggtcatggggccggtcgtcacgccgccggaatcgaacgcgacggcgagaaattccggcgggacaaaaaacgccagaagaaacacgacggcgtagcatccgacaagcagcggcggcagcgcgatagaaaacagcatgcgcagaagcgacacgacgagaaacacgccgacaccgcatgcgacggatagaatgagaattaaattcggcacggacggcacctgcgatgcgagcacctgtaagtccggctccgagaccgtgatgataaagccgagcaaaaacgaaagcgtgataacggcaccgagctttttcgtttttgtcatggcggtaccgatgcgctcgcccatgggggtcatggcggtctctgcgccggtggtgaagaacatcatgccgaccaaaatgagcactgcgcccattaaaaagcacagcagaacgcttggcgagagcggcgcaatggtgaacgagagcgccagcacgatggtgatgatgggaaggacagcctgaagcgcttccttccatttttcagagaggatttgtcttagcttcaatcgatgcctcacgacctttcttatgtgttgtggggtagttgaacgaaaatcacttttattatagcataaaaacgtgtgacagtgacgattaaaattgtgaatttttcaaaaattgtatcaacctaaaccaaaacggaaatagagatgaaaacgaaaaggctgcccggcaaagtgcgggacagcctttttggatgaaattatagctttgaaagaagcgcttcgacgtggctttgtgagaacgagggtttgtcgcccatggggaacgggatatgaagcgccttgtatttggcggcgcagatgtttttaaacggcagccactcgattttctccaaattggagaacgactccgcgagagctttgacggcgcggaggctctcaaccgtatcggaaagaccgggcgcgacgacgtggcgcacccagaggggaatatgcatcgattccgtaaggcgcatgaaatcgaccgtgtgctgcaaggagccgccgcagtgggatttgtactgcgcttccgtggggaacttgatatcgcaaaggacgaggtctgtgtgcttgagaacctgcttggcacgggaaaggtcgccggcgccggcggtatcgagcgcggtgtgaatgttgtgttcatgcaggcgccggaataattccgcgacgaactcgggctgcaaaagcggttcgccgcccgagacggtgacacctccattttcgccgaaataggggcggtaacggagaattgttttgcagagatcctctgctgtgtagggcgtgccgccggttaagtcccacgtttcagggttatggcagtaggcacagcgcagcgggcagccttgcagaaagacgacgtagcgcaggccggggccgtctaccgcgcccatggactgtacggagctgacgcggccttccattagattgcctcgtggaatgtgcgggagatgacttcgcgctgctgctctttggagagacggtggaagttgaccgcatagccggaaacgcggatggtgaggttggggtatttttccgggttatggtaggcatcgatgagcgtttcgcggttcatgacgttgacgttgaggtgatgcgccccctgaatgaagtagcccgaaaggagctggacgaggtttgtgatgcggtcttcctccgttttgccgagggcttccggaatgatggagaacgtgttcgagatgccgtcgcggcaataatcataagaaagctttgcgacggagttgagctctgcgagcgcgccggatttatcacggccgctcatggggtttgcacccggggcgagcggctcgccgagtttgcggccatccggcgtgttgccggtctttttgccgtacataacgttggaggtgatggtcaaaatggacaacgtgtgctgcgcgccgcggtagagcgggtattcgcgcagggcatcgtagaagcggcgcacctgctcgcaggcgatggaatcgacacgcgggtcgtcattgccaaagcacgggaactcaccctcggtctcgaagtcggtgacgaggccggtctcggggtcgcggatgcagcgcaccttggcatatttaatggcggaaagggagtctgccatgcagctcatgccggcgatgccgaacgccatcaaacggcggacgttcgtatcgtgcagcgccatctggctcttttcgtaggcgtatttgtcgtgcatgtagtggatggtgttcatggcatcgacgtaagtttttgcgagccaatcgcggtagaaatcgaggcggttgaggaggccgtcgaaatcgacgtattcgtccggccagacaggcatttcaggcgcgacgcgggtctttttcacttcgtccatgccgccattgatggcgagcagtacaagctttgcaaggtttgcgcgcgcaccgaagaactgcatatctttgccgacgcgcatggcggagacgcagcaggcaatggcgtaatcatcaccgaatgcggggcgcataacggtgtcgctctcgtactggatggcatcggtatcgcaggagaccttcgcgacgaagcgcttccagttttccggcaggtgcttcgaccacagcacggtgaggttcggctccggggacgggtggaggttatagagcgtatggagcatgcggtaagagtttttggtgacgagcgtgcggccgtcctcgccggtgccgccgagggactcggtgatccacatggggtcgccgccgaaaagctcgttgtattcgggtgtgcgcaggtggcgcgccatgcggagctttaagacgaaatcgtccatgatctcctgtgcgccggattcatcgagtacgccttctttgaggtcacgttcaaaataaatgtcaaggaatgtggaggtgcggccgaggctcatggcggcaccgttctgctctttgatggcggcgagatatgcgaaatagagccactgcacagcctctcgggcgttttctgccgggcgggtgatgtcgtaaccgtacatggcggccattttcaccatgtccttgagcgcggtgatctggtcggtgacttcttcggaaaggcgaatggtatcggccgtgaggggatttttgccgaggtcggctttatctttctgcttttggagaatcaaacgatttacgccgtagagcggaacgcggcggtaatcgccgatgatgcggccgcggccgtaggcatccggcaggccggtgatgatgccggcgtggcgtgcggcgcgcacgtcatccgtataggcagagaacacgccgtcgttgtgggtcttgtggtatttaaactcctcttcaattttatcggagaccttgtagccgtaggcttcgcaggcggagcgcaccatgcgcatgccgccgaacgggttgcaagcgcgctttaacggctcatcggtctggaggccgacgatgatctcgttttccttatcaaggtagccggggccgaaagacgtggcggtgatgacggtttcggtatcgatgttcaaaacgccgccgttttgctgctcggcgcggcagagagcctcgtacttttcgagcattttttcggtgcgtgcggtcgggggctgcaaaaagctttcgtcgcccgtgtagggggtgtagtttttctggatgaagtcgcggacatcgatgcgatcctgccacttaccgcctttaaaatctctccaagcgttcatagtttcccattcctttccggcgttttgccgtgcaaatttccttgttttggaagctgctgacataaaaacagggcagtgctttcaaaacactgcccagacggtcggctcattttcatacttttgctccacgatgtccccatcttgtattccgtcagtcacaaaagtactttaacttgtggtcttattgtacacgcaaaagtgcgaaatgtcaactgtgaattttacgttcgatgtactccacctctttgtcgagcataacgggggtgagggaaacgccgaacaggtgctcgataaggccggtttttaatagctcctccggcgtgccgctttgcatgatttggccgtttttcatgagaagcaggcggtcacagaacttgaacgcgagggggagctcgtgcaggacgatgccgacggctttgttttgcactttgagcgtagagaggagcgccatgagctcgaatttatggtgcgcatcaaggtaagtagtgggctcatcgagcaggacgacgtcggtgttttgcgctaaaagcatggcgaggaacacgcgctggcgctcgccgcccgaaagcatgggcaggcggcggtcggcaaaggccgacacaccggcagttttaagcgcgttttgaatgacggtgcggtctttatcggacagcgtgcgcgaaaagccgaggtaagggtagcgcccatgggagacgagcgttttggcggtgatatccggcacagccctttgctgcggcaggaacgagacgcgccgcgcgagagctttgggggcaagggcagcaatgtcggtttccgcggtatcgccgcacagggtgatgctgccggaatccgctttaataaggcggcagagcgcgcggagcagcgtcgttttgccgcagccgtttgggccgaggatgccggtgacttcgccgcggcggagttcacccgagactccgcggagaatttcggcgtgatttaacgtgacgcaaaggtcagcgaattttaaggcggtggaaaggttttggttcattcgagttttcctccttttttgcgcacgatgaggaaaaggaagaacgggccgccgagcagcgaaagtacgatgccgacgggaatctcatacggggaaaacagcgtgcggctgagggtatcgcacaataagacgaatgacgcgccgaagagggccgaaagcggcactaagatgcggtggcgcgcgccgatgaagtggcgcaggatgtgcggtataatgagccccacgaagccgagaagccccgaaaagctgactgcgccgcctgcaagcaggctggccgtcatgagcaggagaaagcgtgttccttgcacacgcatgccgagcgactgcgcggtctcatcgccgagggagagaacgtccatttcgccggaaaacagcacggcaaggagcagaccaagcaggatggcaatccacgcgggggtgagatttttgtatgcgatgccggaaaatccaccgatgaaaaaggagctggaattatagatggtatccgggaaaaaggtctttatggcgttgctgccggcggtgaaaacactgcttaaggccacgcccgcgagggtgatcgttgtgcgggaagcaccgcttttagccgcgacggcataaatgagcagcgacgcgaaaagagcgccaaggaatgctgcaaacggcaaaaacacggtggctgtggggaagacggcgagcaaaaacagcacggcaaagcccgccccggcgttgacaccgatgatgttcggtgcggcaagggcgttatttaagacattctgcaagagcacaccggagaccgcaagtgctgcgcccgagagcacggcggcaagggcgcgcggcaggcgcacgtagaacaggatgcggctgtcgggcgttaaactgccgttttgcagggcagagacagcttcgcggatagaaatttgtgccgagccgacacagaggctcagcacaaaggagaaaacgagcagcaggagcgctgcgggaaataaaattttcttacgcatcttcgttcaaaaggagctttgcaatgtatgcgtagctctcgtcccagcggtttaagggcttatagtggaaaagttctttcggcaggtagatgtagcggccgtttttcacggcggagagctcgctccacgcggggttattttcgatgttctctgccatgtaggtcttggcgttttcttcgctgcccatcgtcatgacgaggatgtagtccgggtcggcttcgatgacggattccaaactgaggtcttcgagcaggctttcgttatcgtctgcgatgttgtgcgcaccgagctcttttaaaatggcgcccgcaacggtgtcttcgcctttggccttgacgccggtggaataagcgcgcaaaagcaggacggtgggagctttctgtccggagagcttttcggctgtctcctgctttatagattcaatgcgctttaaaacccgcgtgacgttttcgtcgtatttttcaccgtccgggtcgttgacagcgcagaaattcagcatgatctttgcataatccatgacgttatccatgtgaaaatagccatgaggaatctgcatatcggtgagggcggaatcgagctccgcgtgggcgggcaggtcggcggataaaatcacgtaatccggggagagtgccgcgacgctctcaagattcggctccatgacggtgccgacgagcgcggtgtcgtcatcgatttcgatgccgtgctcgtctacggcatcttcggtaataccggcgagtttaccgccggagagcagccagcactcggcaaacgagccgtaaagggagacgacgcacgggtcatcggggagctccgttttggtgccataggaatccgtaatgacgcgctcggagacggcggtcgtttcggaagcggcggaggagctttcaggggtagtttcgttttgcgccggggcggcgcagccggaaaggagcagcacggcggaaagcgcgagcgctgcgagaaacttgaatttcatagggtatcctttcggaattattttgtgaggatctcctcgcggcggttcagaagatcatcggagaagacgtcgtgctcgaatttttcgatgccaagacggtcaatcgctttgccgaggcgttctttgggcatggcgttttccttgaaccagagcatggtcttctcaagcagaggttcaatctccgcgcgggtgacgaagcggctgagcggcgtgcccatgcgcgtttgcttgccccacgtgccgccgacataaatgcggtaaacgaccgggctttcgtggcggacagccttaaacgggcatttgccggtgcagacgccgcaggcgaggcacttttcatcgatatgtaatttgccattttcgacgtgtgcagccttggagggacatgatttttctaccatgcagactttgcagccgcggcaggtgtcttcgtcgaagatcggcacgcggtggccctcgatgccgaaatcgtttaaagaaggcttcatgcagctattcgggcagccgccgatgccgattttgaacttgtgcggcagtttgacatttgcccagccgacgtagtatttttcgtgcagctctttggcgagcgcctgtgtatcgtagttgccgtagacgcacgtggtgcccttacatgcggtgacggggcgtattttagcgccggtgccgccgaagtagaggccacgctcggcagcgtaattgcaggcggcgtcaatctgctcgaaggggatgccgacaatctcggcagacaggcgggaggtgaacgtcaccttgccgctgccgaatttttcggcaatctcggagatggtgcgcaggtcggcagcggtgaagaccgcgccggcgcagacgagacggccggagaagcactctgtgccgcgattgatgaggaaaccgcggcccttgacggacgcgatctgttcgggttttaacatgatgaacactccaatatccaagcaaaatattccctgtaattatagccccttttcgggggaatggcaagaaatgcgggtgatttttgcaaaagaaatgaaaaaaccgggcgaagtattggattttcctttgaactgtgttaaaatagctaataacaaatcatcttctgttccggcggcgttttgaatgcgcgccgaaaaaagaaaggcgaagtgagcttttatgaaacgaagcatccattataaaaacattttgaaaacggcggtcacggcggcactgtgcgccatgataatccttggcaccgcggcgtgcggcaatggcggcaccaaggcggagccctccccctccccgagcgtggagcctaccgcaacgcccgtgccggtcgaaaaagtgaaggtggcgaccatcaacgacatcgacgattcattgaatgtgcgcagcgaggcttcgacggattccgaaattctcggcacggcagaggccggcgaggtgttcgaggttgtggcacaggacgatacctccgagtgggtggaaatctcttactttgggcagaatgcgtatgtgttcgcggaatttgtgacgatcagtgagaaagagaagaccgcacttgcgaccgcgacgccctcgccgaccccgaatgcggaagacggcacgaccgatgacaacggggacagcggtgacgcgcaaaatggcggcgaggcatcgccgacacccgctcccaccgcagagccgacgccgaatgcgaataatcctatcatcgtaaacggcggtaaccgagagaatacgagctccggcagcacatcagaaggcatgacggcagagaccattcgcgatacggaagacccggagcgacgctgaggtaaactatgaatgtgttagttataggctgcggcctgcttgggcgaaaaatcgcccgcaccatggacgaaatgggttgggacgtttctgttttaagcaacattgaaagcgacttggagcttttggaaaacgatttcgagggcgtgacattccgcgggttcccgatggatattcgcaacctgcgcgaagcgggcattgaaagctgtgacgcggtggcggtgacaacggcggacgataacctcaatatcacggtggcgcagattgcgcgcgattacttcggtatccaaaacgtggtggcgcgtgtttccgaccccgcgcgtgaattgatttttgagcatatgggattgcataccatttgccccacaaaccacgccggcgaccgcattgtgcggatgctgagcggagaaaaaatgaacaagaaactcgagttcggtctgcatacggtcgactttgacgtgcggccggcggagcggcatcagatcggcaagaatgtgggcgaactgcgcggcaacccgggcgaagtggtgttcggcatcatccgcaaaagcggcgcgttcgttttagcggggcttgcacccttgaagcttgaggcaggcgacgagattgtgtacagccgcgcaatcgattaaggggggaagtgccatgaacattgtcattatgggcggcggcaaggtgggcgaaagccttgcgcgccgcattttggagggccgccgccacgaggtgcgtatcatcgagagcgaccgcgcgcgcagcttacagcttgcaaacgcgctggacgtggagatcatctgcggcgacggcacgaacattgacatgctggaaaacgccggtgtacgtgacgccgactgctttattgcgatatccggtgacgatgcgaataatctcgttgcgtcgcagcttgcaaagcagtatttcggcgcgaaaaaagtgattgcccgcgcaaacgacccgcgcaatttggagacgatgcgtgtgcttggcgtggattatgcggtgagcagcacggaaatcattgcgcagatgattgagcaggaagcgaacttgatggagtttcatcttgtggcatcgctgaacaagggccgcggtcagatttgctccgtgacgcttgaagagaattcggctttgcacggcaagtcggtgcgtgaggtggtgttcccgaagggggcgctgctgatttctattgtgcgaaataacaagctcatcattccgggcggcgacacggtgctgcaagcgggcgatgagattattgcggtatgcgaggaacgcgcacagaaggcacttatccgcctgatgaacagcacgcatgcggatgagaaataagtcgatttttttatgatttattatgatttatatagcaggaaccccgtaggcacgttgtgtgtttacggggttcctgctttgttcatttaattctaatgatttgcggggcaaatcatgcagggaacccatgcaaccgggtttcctacggttctggttttgtggagacaaaaagtgtttcgcgctctgcgtagcacgacttggggcgctgccccgagaccccataaactttctgaagaaagtttaatcaaagacttttaacgttgcggtattatggatttcggcggctttattttacagctttaaagtgctttgtgacgctggtgccgtcttcgtagacgtctcttgtcaaattaaggcctgcgttcatcagcatggcgccggaatagacggtgccggtctcctcgtcctgatagtacgttttggggtcgagaccgcgcaggcgctgcacgcagtaacgggtctcgggctgacgcatgacgacggcagtcatcatggcttcctgtttatccggcgaaacgaactcccacgcgcagtagaagtcgttctcggtcggggagacgaggcggtagaaatcgccctcgcggacaaggcggtgatatttgcggtagtcggcgatctgctgctttacttcggctttttcgtcatcggtgagctttctggggtctaactcgtagccgaatgtgccgcacatggcgacgttgccacgggttttaagcgaggtgcgcgggcgggctgcgacgtgtgcgccaaatgaggagatagggtagcacatggacgtaccgaactgaatggtgaggcgctcgatggcgtcggtgttgtcgctgcaccagatctgcggggaataatacagcatgccggcatcgaaacgtccgccgccgccggagcagttttcaaagaggatattcggaaacgctttgacaaaacgatccatgaggtcgtatgtaccgagcacgaagcggtgcatgacctccttctggcgctccggcgggagcagcgcagagccgacctcggtcagattgcggttgaagtcccacttgacgtaatcaatcttattttcactgaggactttatacatctgcgcgaagatattatcgcgcacgtcttttctcgtcatatcgaggacgtactgcaagcgtgcgggggaattttcacggttcggcacgtgcaggcaccaatccgggtgggcgcggtagaggtcgctgtccggggaaatcatctcgggctcataccagatgccgaactttaagccctctgcgttgacgcgttcgatgagggagctgaggccgcctttgagcttcttttcgttgacataccagtcgccgagagaggagttgtcgctttcgcggtggccgaaccaaccgtcgtccatgacaagcatatcgacgcccattttggcggcttcgtgtgcgaacgcgacaagtttatcatcgtcaaaatcgaaatatgcggcctcccagctgttgatgagcacggggcgttccacatcgcgccacggacttttgatgaggtgcttcatgtaggtgcggtggaaaatgcggctcatctcgccgagacccttatcggtgtagaccatgacggcttccggcgcggtgaaggattcgtttggctccaggcgccaggtgaaatcggtggggttgatgcccgcgagaaggcgcgtggcgttcaaacaatccacttcggcttcaatggagaagttgccgctgtaaatgaggttgacgccgtagacttcgccgttttcttcggtggcgccgtgggctttcagtgcgacgaacgggttgtggttgtgtgaggaggagccgcgcttgctctggatggattgaatgccgtggcagagcgggcgctctgtaacggtgcgctcctttgcccacttgccgtaaaggtgcaccatgtcgtaatccatcgtgttgaagtcgaggcaggcgctgaacacacgctcaagttccatgacgcggtcggacgtattcgtcacgacggcgtgacgcgtcatgacgggcagatctttgtaaacggtgtagtagagcttcacttcgacgttcgtcgtttggtcgagcgtggtgacttcgagcgtttcgctgtcaccgttttcgtcgcgcagagacggcatgccgggcagcgcaggcttttcgcttaaaatgcggtgcgaaacgtagcgaatgtcggtcgcgatattgccgtccgcgttgcggatttggagtgcggagatgcggaaatcgccggtgccgttgcaggaatattcgctcggctgtgtatccggggaaaactccgtgccgacatagcctgcggcgtcgggcgtgaaggagacgaagtagccgcggtccaataaatagcgcatgtcgcagtccggcaggtatgcgccgtagtagagatgcagcaggcggccgctgtcatgcacggcaaaaacgtaactggaggaagcggtatccagcttgaaaattttcttttcggcatcaaataaaatcgccataaaatcgttcctttcgggaaaacataaaaattcgggcagagaaatatccgtttataacaacagtatatcgtttatgcggcttttacgcaataggcatttgttgcataaagttggcggtttgtgatgctgtgtacggcgcgggcttcggcattttgctaaaggcggcgatgaaatttggtggaattgtgatagaaacggttttttcggaaaaaatagctttacttttctcttggtttgtattatagttaatgtgatgtggaagcggttacacattgtaaaggactgtatgtgttcgctttcgaatgtcttttgaaaaaatataaaatggaggaaactacaatggctaaaattatcggcaatgcactcccgaacatcccgtggcaggataagccgcagggctacgataagccggtttggcgttatgaccacaacccgatcattccgcgtgatctcatccccacttccaacagcatcttcaactccgcagttgtcccgtttgagggcaagttcgctggcgttttccgctgcgacaaccgctctgttgagatggacatcttcgcaggcttctccgatgacggcatcaactggaagatcaaccacgagccgatcgacttccagccggctcccggctgcgacccgtgcgtaacccgcaaggaatatcgctatgacccgcgcgtatgctggattgaggaccgttactacatcacctggtgcaacggtttccacggcccgacgatcggcgtaggctatacctatgactttaagaccttctatcagatggagaacgcttacctgccgtataaccgcaacggcgttatgttcccgaagaagatcaacggcaacttcgcaatgctgagccgtccgtccgacaccggtcacaccccgtttggcgacatcttctacagcgagagcccggacatgacgtattggggcaagcaccgctatgtcttcggcacgagcagtcactccggctggcagtccaagaaggtcggccccggcccgattccgatcgagaccgatgaaggctggctgatgatttatcacggcgttctgaactcctgcaacggcttcgtttatcgcttcggcgtagcgcttcttgaccacgagaagccgtggatcgtgaaggaaagaggcaacttctatgtcttcggtccggaagagagctatgagctcaccggtgacgtgccgaacgttacgttcccgtgcgctaccctgaccgatgccgacaccggccgcatcaccatctactatggtgctgccgacaccgtcaccggcatggccttcaccaccgttgacgagctgctttcctacatgagaaagtacccgcacgaagtttaatcgctttggttaaacgctttggttaaattagaatagctttttcgcaggcgcttccgtttttcgggagcgcctgttttttatggaattgttgtattttacggtaaaatctggtatgatgaagctatgaaaaaccgcgatgggcggaaaacggttaggagctgtatgaatatgaaagagtatgtcattgagaaaacggtgggtgcgccggactggacaaaggtgccggagctgcaggtggacaatgtttgttggttgccggacgcgggcgtgcgcatggagcagcagatctgccacgacgacgagaaaatctacgtgcaccaagtggcgcgcgaaaagaacatccgcgcggagctgaccgataagctcggcagcatctgcacggacagctgcatggagtttttcttctccccggtgccggaggacgggcggtattttaacattgagctgaacttgaacggcgcgattttccttggcttcggccacggcagagcagacagcatccgtttgatcccggaagaccacaagaagctttttaacatccgcacgaacaaaacggcggacgggtgggaaatcttttatgaaattccgctcgaatttctgcatgtattttaccccgattacgactttaaaagcggacgtgtgatccgcgcgaactgctttaaatgcggcgacctcaccgtgcagccgcactatatgatgtggaatgagacgacgagcgaaacgccggatttccatcgtccgcaggactttggtcgcatgatcttcgcgtaaaccgcagtattcagcgggatattcatggattagtccaatatcttttgccgaagcccgcgcagaattgtcgtttttccaagttgcaaggtgagcgaatttccagtaaaatagtaataatgggtaaatgaaaaatatcgcaaaagttttgcatagcttatgcgcctgacgcaaaactatcgtttagagtattgcgtcggcaggaaaggattggtgtgcatatgccactggaaaggatcgacagttattttaacggcgcggtggagtcttatgacgagcgcttgaaacgcagcgcagaggatgaagacggctacattcgccgcacggcggagtttttcccgaagaaggagcacctgcacattctggacatcggcatcggcacgggcacgggtcttacggcaattttagagcagaacccgacgatttatgtggacggcattgactgcgcggataagatgctctcggaaattccgaaaaatctgccggagcacaaggagcgcatccgcacgatttgtggtgatttctttaaatatgagttggagccggaaagctatgacggtgcggtttccatgatggcgctgcattattacagccgcgaagagaatttggagctgtttcaccgcgtgtgccgcagcattaaaaagggcgggttctttctgttgagcgacaaattcgcgccgacgcagatgtatgaggacttctgccgttccgagtttgagcagaagcgcaaggagcagcatttgtcggcagacgagcattactattgctttacgccgcagtatgtggcgggcgaagcggcgctgcttttcaaagcgggctttgcagaggtacgtgtgtgctgggcgaaatccaacacggcagtgcttcttgccacaaaataaacaaataacagttgaaaagccggtcgaactgcgtacaaataaacggtacgcgtcttgaccggcttcttttttaatgctataatgtttcaaaagcaactattttgggaatgggtgaatacttttgaaactctttaacgcacagcatgttttgcacggcgagcctgtgacgggcgagctgccgtctacgaactcgcttttcaaaacgaccatcaacatggcgtggccttcgatggtggaatcgtttttggtggcgctcgtcggctttatcgataccatcatggtgagcacgctgggctcttacgccattgcagcggtgggcctgacgcagcagccgaagttcatcggtttggcgctgtttatgtcgatgagcacggccatctcggcgctggttgcacggcgtaggggcgagcagaaccgcgaaagcgcggtgcgcattttgaaaacatgcattctggtcgccgtgattttgacggcgatcatcagcgttacgtttacggcgtttgcagaccccattatccgctttgcgggctcggcggacgatacgcatgaagcggcggtggagtatttccaaatcatcatgggcggcatcgggtttacaaccgtgatgatgatcgtgaacgcggcacagcgcggcgcgggcaacacaaagatcgcgctgcgcacgaacatggtctctaaccttgtgaacgtggtgttcaactatctattgatcggcggtaacttcgggtttccggcgctcggcacgcgcggcgcggcgcttgcgaccgtcatcggctctgtgctcggctgcgcgatgagcttgcattccatgttcgcgaagtcctcgtttgtgtatatccgcggcgtgaaaggcttttttgcctcgaggtttgacgtgcgctcactgcttaacgtcggttccagcgcgtttgtggagcagattttcctacgcatcggctttttactgttcgccatcaccgttgcgaatctcggcaccactgcgtatgctgcgcaccagattggcatgaatatgatgagtttgacgttctcactcggtgatgggctttcggtggcgtctgtggcgctgatcggcaggagtctcggcgaagaacggcgcgaccttgcaaagctgtacgcctccatgtgtcagcgaatcggacttttctgcgcgtttgtgatgtcgatggttttcctattcttcggcaggaatctctatggcctgttttcgagtgagcaggaaattctcgatatgggtgtgatgattatgcgcatgctgtgcgttatcatttatctccagatcacgcaggttattttcttcggttgcctgagaggcgcgggcgatacgaagtataccgcgtttgcgtctatgatcagcgtcgccattatccgaccgggcttgagctggctgctgtgctacccgctgggactgggactgcttggcgtgtggcttgggctgttcggtgaccaatttatgcgattctgccttgggtatttcagaatgaagcagggcaaatggctgaaaattaagatttgacgcgtttacgacaacgatagcggagcgacgaataaagtctttgtccaactttcttcgagaaagttggtggggtcttggggcaacgtcctaagtcgtcgttcgcaaacgacgaaacaccttttgcctaacccaaaacgaggaaggcagcttgaaacatccagtggacgcttcaagagtagggaacacagttgcatgggttccctgaaaggcggtctgcgactgcctttcgaaattcaaataagataaaatagaagtaaaaagtctccgtctttctctgaatcaaagaggaaaacggagacttttatattttaaaatagtgattattccacaacgaccgtgcagtgctcggtgccgtagtattccatcgcggagatgacctcaggggtcaggcgctcaccgcatacagcaagtggcaccgcaggtgggcagctcacgttggcgtctgccaaaatgcggtttttgcactcggaaagcggcaacatttcactcggcgagaagagcgcctcgcgcggggaaagtacacgctcggcatgcggcggcacaggcggctttgaaaggatcgccggggcgggcagaacggagagcagcgcgcgctcgagacgggcgaaatctgcgggtgtggtctccggcgtgaacatcatcacaaggtggtctgcgtcggaaaactcgcagtaaatattgctgtgcgtcaaaatttccgccagagctgtgcccgtgtagccgaaggacttcggcaataagcagagctttgtgcgctcctcgccgcaaagagcatagccgtgcgcacggagctttgctttcagcgtgtcaagacgctccgcacaggctttgagctgtgcgggaaaagatgttgctaaaagcggattcattgcgtcgagcgactgcaaaatgaggtaggacgggctcgtggacgcaaagagcgccatggcgctttctgcacgctgcgcgaacatgtccggcgtgccgtgcgcgatgtgcagatacgcgccgcccgttaagaccggcagtgttttgtgtgcggaatcacagcagatgtctgcgccgagctgcatggggtgcatgggctcgggcagaaaacgcaggtacgcgccgtgggcgttatcgacgagcaataatatgccgtgttttttgcagacggtggacagggacttgatatccgcgatgttgccgagataatccgggcttgtgatgtacacggcggcagggttttccgatacgatcacgtcttcgagctgcgcgggggtgatggcgcaggaaatgacgctttccgtgccgtagatccagcgaatgtcaaggtcgagcagcgctgcggccgtcatgaagaccttgtgtgcgttacggcctgccgcaatgacgggctttttgtgatttgcgcgggcatgcagcagcgcaagatacagcatggcgcggatgcacagggacgagccctcggcggaatagaccgtctttttggtgccgaataacgcggcggcgttcgcttcgctttcgcggatgatgccctcggcgtggtagagcacgtctgcgccctcaatctcggtgaggtcgagcggctcggggccgagcagcgcggtgcccttgtggcccggcatgtgcatgcgcaaagcgccgctatatcggtagcggcgcacaaattcgcagattggcgcggttatcatgcgttgttatccaatgccttggaggcttcgagcatgatggcgcattccatacgttttttaaagagctcgcagccctctttgtaaacgccgcggacggagccggtggcgtggtaggcgtttgcggcgcagccgccggagcagtacagtcttgcccagcaatcgcggcactcggggtgagcgtacacgttgcaggaggcgaaatccgcctgaatttccgtgttcgtcacgcctgtccagacatcgccgaggcggaatttttcgtcgccgacgaactggtggcaggggtagaggtcgccccacggggtgacggccatgtactctgtgccggagccgcagcccgaaatgcgcttgtaaatgcacgggccgccggtgagatcaatcatgtagtggtagaacgtgaacggtttgccagcgcggcggcgctccagcatgagctcagcaagcttttcgtactgctccatgacgatgacgcggtcttcgtcggtcagcgcggaggggtctcccggtgcgcagacgaccggttccatgctcagttccgtaaagccgaggtcgagcatttgctgaatgtccttgagaaaatccgggtttgcgtgcgtgaatgtgccgcgcatgtaatacgccttgttgccgcgcgccttgacgagcttctggaatttcggaacgatgcgatcccaactgccgttgccggcgtagtctacgcggtagcggtcgtgtacttccttgcgaccgtcgagactcaaaacgacattgctcatctcgcggtttgcaaaatcgatgacgtcgtcgtcgatcaaaacgccgtttgtcgtcaacgtgaagcggaagtgcttaccgcattccttttcgcgggaacgggcatacgcgacaagctgctttacgacgtcgaaattcatcagcggttcgccgccaaagaagtcgacttccaaattgtggcgcgtgccggaatgttcgagcaggaaatcaagcgcctgcttgccgacctcaaaggacatgagagcgcggtcgccgtggtacttgccctggcttgcaaagcagtaggagcagtttaaattgcaggtgtgcgccacgtgcaggcacagcgccttgacgacgttggcgcttttcgctttcagcgcacctgccatcggctcgaacgtatcgggggtgaagagcttaccggcatcgcgcaactcttcgatctgctcgtagcactcgttgatgtcggcttcggtcacgtcctcacggtcgccgtatttttccagcatagcggcggtaatcgcctcgcggctttcggtctcgaacaggccaatcatgtcataggcaacttcatcgacaaggtggacggagccggaacagatatcgagcacgatgttcatgccgccgagtttataacggtgtatcatctaaaaaatcctttcgcatctatacatgaaaaaagccgccaaaaaaggcggcgttttctgaacctttgaattacttcgcgttcttctccgtgttctcgcactgctggtttgcaatgccgcagctcgtcttgcaagcagactggcaggaagtctggcactcgccgcagccgccgttctttgcgctttcgcacaggttgcgggtctcaagcgtctgaatgtgtttcatatcatttcgcctccgaattgttactttataagctaactttattagccttaaaattctaacacagatagggcgggatgtcaagatgcaaagccgccggatttcgggaaaaagcatgtccccacgccatttctgacgtggggacacggaaaataggatatcggagaaatcagttttaaggagtgttttgaatcagtcaccgaaagcctgggaaagatcggcgatgatgtcatcgatgtgctcggtgccgatggagaggcgaatggtgttcggctggatgccctgctctgcgagctcttcttcgttgagctgcgagtgcgtggtggaagccgggtggataacgagggacttcacgtctgcgacgtttgcgagcagagagaaaattttgagtctgtcgatgaacgcctgtgcttccttagcgccgcccttgatgttgaacgtgaagatggaagcgccgccgttcaggaaatacttcttataaagctcgtggtacgggctgtccggcagagacggatggttgacgctttcgaccttcgggtgcttggagaggaaatcgacaaccttcagcgcgttctctacatggcgttcaacgcgcagagagagcgtttcaagaccctgcaggaacaggaatgcgtgcagcggagcaagcgttgcgccggtatcacgcaggaggattgcacggatcttcgtgacaaaggctgccgcgccgacgtcctttgtgaagctgatgccgtggtagctggggttcggctctacgagagacgggaacttgccgctgccttcccagtcaaacttaccgctgtctacgataacgccgccgatcgccgtaccgtgaccgccgatgaactttgtagcggaatggacaacaatgtctgcgccgtactcgaacggacggaggaggtaaggcgttgcgaatgtggagtctacaacaagcggaatcttatgtgcatgtgcaatggctgcgaccttttcaatgtcaatcagcgttgcgttcgggttaccgatggtctcgatgaaaacggcctttgtcttatcgttaatcgcgttttcaaaagcaccctcttcgtccgggtctacgaacgttgcggtgatgccgtactgcgggagcgtgtgctcgagcagattgtaggtgccgccgtagatggtcttcgcggaaacgatgttgtcacctgcgcttgcaaggttgagaaacgtatagttgatggctgctgcaccggaagcgacgccaagtgccgccacgccgccctcaagggctgcaatgcgctgctcaaatgcgtccacggtggagttcgtcagacggccgtagatgttgcctgcatctgcgagcgcgaagcgggctgctgcgtgtgcggagtttttgaagacaaaggaagtcgtctggtagatcggcactgcgcgggcatcggtagcggggtccgggttctcctgacctgcgtgcagctggatggtttcaaaatggtaattgttatcatatgtatagctcatggtaatacctctttcataatttcagaatttaatttttgttttaacggattttgagaagttgacgaaaagctgagcttcacattcgtccgtttctgaaattgtggcgaagcatttgccggaaaagggatcgcatcatcggggtgcgcctcctttgagatttacttcgatttttatgtttgaaggtttcataacactcaaaacatattgacttggtatgttttgtatgatacacgctagattgcaatttgtcaacccctaaaatgcaaaaattgaagaaaattttcggaaaccatactattatataggggaaactgcattttgcattgcaaaacggcggatcgtttcaacgagttttaaaggtaaaaggaaaagtgaaaaaagatgttgacaaatttaccctgtggtgataggatataaacaagctcaataacctataaaataagtaggtttcataagtttagtaaaacaaggcaaaggagagacgcgatatgaacctgtttccgtacagtcggcgatgttgcgccgcagcctgaaacgatacaagaatgcaaactcatttatataaagtgttttaaggagactttaccatgcgtgtatatcggaaaatcacagacctcatcggcggcactccgcttcttgaactcaccaactacgaaaaagcaaatgagctgaacgcgaaaatctacgcgaagcttgagtatttcaacccggcaggcagcgtaaaggaccgtatcgcaaaagcgatgttggacgacgccgaggaaaagggcctcttgaagcccggcgcagttatcattgaaccgacaagcggcaacacgggcatcggccttgcttccgttgcggcttcccgcggttataaggtaatccttaccatgccggagacgatgagtgtggagcgccgcaaccttttgaaggcttacggtgcggcacttgtcctcaccgaaggcgcaaagggtatggcgggcgctatcgcaaaggcgaaggagctcgccgagcagaccccaaacagctacattccgagccagttcacgaacccggcaaacccggcggtgcacctgaagacgaccggcccggaaatctgggcagacacggacggcaaggttgatatttttgttgcaggcgtcggcacgggcggcacgctctccggtgtaggcgcgtacctcaagtcgcagaaccccaatgttaaggttgtcgcggtggaaccggctacctcaccggtcctctccggcggcaaggcgggcccgcataaaatccagggcatcggcgcgggctttgtgccggatacgctgaacaccgacatttacgatgagattctccccgtgcagaacgaggacgcgtttgcgaccggccgcgcgctggcacgcagcgagggcgttctggtgggcatctcctccggcgcggcagtctttgcggcagcacagcttgcaaagcgtccggaaaacgcaggcaaggtcatcgtggcgcttctgcccgataccggcgaacggtacctctccacgccgatgtttgcagactgatacggcatacaagaatccaaacacatatctttgggatagaaaaatgaatgagggaaaggggcaaggttttcgggctttgccctttttcgcgggtttaaaggagtttatagagggcgtttttacagtaaattaccggcaaaaataaaactcttgaaaacctactaaaaacatgttattatggtataaagtttgcggcggacagtgagcccgcttgttttattccggaaacgctattttacataaaggatggataccgcatgaaaatttccaccaaagggcgctatgcgctgcgcatgctgctggatctcgcacagcaccagaatgacggctacgtcgcgctgaaggacattgcccgccgtcagaatgtctccaaaaaatatctggagcagatcgtgccgatgctcaataaatccgatattcttcttgcaagccgcggttttcagggtggatatcgtctggcgcaatcgccggataaatacaccgtgggcatgattctgcgcatcacggagggcagcctcgcgcccgtcacgtgtctcgatcacgaccccattctgtgcgaccgcagtgcagactgcatcacgctgcctgtgtggcaggggctcagccgcgccatcaacgaatatctcgacagcatcaccctgcaggatatattggatcagcagcaagcggctttcgtcaacgattacagcatttgataaaaagataccgcattcggttgtaggctgaatgcggtatctttctatttgatttgaaatcattcgccggaatttaacagtgcttcggcttcatctgcgtccattttgtctacgttatgcagtttcctttgaattgtcgtatttctcttttgtgcagcctcgatacttgaactggcttcatcgattttcttctttgctttagcaaggagagattcaaacaaatcatattgtgagcttacggcactgagcgtcttttgaatttctgttgtctttttgtttagtgcgatagtgcggaaaccgacattcaacgtgttgagaaacgcggtgattgtggtcggaccgcagatcatgatgcgatacttgttttggatttcctcgcacaagccggggcggcgcagcacctcggagtaaagcccctcggtagcaaggaacataatggcaaaatccgttgtctttgggacattgatgtacagctcggcaatcgtttttgcctgatttttaatgttctgctccagagccttttgcgcggcttccagagcctctttatcggctttttcggcagcctcgcaaatgcgtatgtagtcttcttgcgggaacttggagtcgatggggagccatacggtctcgccgtctttttcacgggaggggatcttaacggcgaactcgacgcgctttgtatcatttttcgtagatacgttgcagtcgtattgatctttggtgagtgtttgctccagtatattgccgagttgcacctctgcccatgttccgcgcgccttcacatttgtcagcacgcgctggagcgcggtcacatcgccggtgatcttacgcatttcgccgagtgactcgtaaacacttttgagctgctcaccgacgactttaaagctgctgtctagacgtttggaaagcgtatctgtcaacttttcatcgacggtcatgcgcatctgttcaagcttcttttcgttgttttcttgtagagcagttaaactttttgtaagcgtttcattgatatgttcattttgccgtgcgctgacctcgcgcatttgctcaagttttttctcagtgctttcctgcaaagcttttaggttttgtgttaaggcgctgcttattttttcattctgctccatattggcttgacgcatttggtcgagcttcttttcattgctctcgagtagtgaatcgatattcttcgtcaaggttgtgctgagcttttcgctttgctgcgtgttgatctgctgaatttcgcgtattagggcgttcatttcgctcaaacggctgtttaagctttcggatgtttcttttcgactacgtgaaaactcatcggcaatataggtttcaatatgctgaaaattgctttcgtaattcgtatttgttgcagtattttcactttttggcttcttgagaagaaagacaatctgcaaaataagaacaattgtaatgagtccaatcaaaatatatagctccattttcattctcctttgttttttctcatgctatcacaagtgatttgaaaagtaaacaaccggtctatagttatatgtagaaaagctcccccgaaacgaattcgggagagcttttgtcatacaatgttattatatttgcttgcggacgatggtgtattcgtcgccggggcggtagtacgggcagttttgaaagcggccgccgatgaactgggcggtctcgtcctcgtctaagtccatatcgcagacatagaagccgtactcatcgtcgtactcgtaatacaggcagtcttcgcattttgaggtattttcaaacatactgtcgccttacagaacgctttgcaggaactggcgcgtgcggtcgtgcttcggatttgtgaagatctccttcggggagccttcctccaaaatcgcgccatcatacatgaacaccacgcggtctgccacttcgcgggcaaagcccatttcgtgcgtgacaacaagcatcgtcatgccttcttccgcaagctccttcatgacgttcagaacgtcgccgacaagctccgggtcaagggcgctggtgggctcatcgaacagcatcatttttggctccatggcgagcgcgcgggcgatggccacacgctgctgctggccaccggaaagctttgcggggtaggaatcgagcttatcgccgaggccgacctgatttaaaagcttcacggccttttctttggcttccttttccggcacgcccttcacgttcatcggggcgagcatgacgttttgcagtgccgttttgtgcgggaagaggttgaagcgctgaaacaccatacccatctcaagcaaaatagcggcgcgttctttatgcggcagctttacctgattgtggccgttcacgcgatcttcgatgagcttgtcgtcgatccagatcttgccgctcgtaggcttttcaaggtggtttaaagagcgcagatacgtcgatttgccggcgccggacggtccgatgatgacgaccacttcgcccggctctacggtgaggctgacgtttttcagcacctctacggagccgaaggacttacagatattttccgttttaatgatagacatagccgtattcctccttattcgtagatggacaggcgcttttcaaggcgattgaaaataacggtgaacacgccggtgatgatgaggtagatgatcatagccgggatataaacgagagcgctcgccttgttggaagcgataatcttcgtctggtaggtcaaatcggtcagcgcgatgatggacacaagagaggtatccttcagcaccatgacgaactcgttgcagatcggcggaatcatgcggcggtaggcctgcgggatgatgacaaggcgcatcgcctgcgagtgggtgaggccgagcgccgtggaggcttcgagctgacctttatcgatggactgaatggctgcgcggatgatctccgcgaggtaggccgcgacgttcagcgagaacgcaatccaagcggccaaaaagcggctctgaatattgaacgccggaacgagctgcggcagcgtgtaatagaggaaaaacagctgcatcagaagcggcgtgccgcggaagaagaagatgtacgcgccgcagacggagcggagtacggtgtttttggagatcttgccgagggcaagaaacacggcgagcacgagtgccgtcagcacggaggtgacagaaagcgcaagcgttacgccggtggcctggagcagcgccggcatccagccgatgatttgttgaatggcgttcatggtgatatcctttccgatataaatggggcaagagacctcaaaacggggcctcctgccgaaatttcattttacgttattgcgcttatgcgtccttctttgtgacgatgacgagctggttggagaggtacggctcggtcatttcatacgcttcctgacgctccggggtgatggaaacgccggcgatgatcatatcgtactggcccttatcgaggcctgcgaaaacgccgtcgaaggaggtgttgacaaactcgacctcaaggccgaacagcttgccaatctcttctgccatatcaacgtcaaagccctggtacacaaggccgctgtcgtcggtgtactcaagcggcggataaccggcctcaaagccgatggtcaaaacgccgtccttaacggtcttgaccttgctcgggtcaacggtcggttcctcggtgacgttgcgcacgccctcggtgacatcggtgccgaagtgcttcatggcgagctcggagattttgccgttataataaagcgtgttgatggcgttttcggtctgctccaaaaggtctgtgttgcctttcttgatgcagacgcccatcggttcgccttcgtcgcttttccaaacgctctggaatttagagtcgtcgtctgcgaggtaatacgccgcgacaacgctgtctacgtacacggcatctgcacggccgagcgaaacgtcatcaaagcactgcgtaatcttttcatacgggagaatctcgacgtcaacgccctcttcctgcattttctgcagagcgtcgtgggcggtggtgccggtctgcacgctgaccttggcgccggcgaaatcgtccgggctttcgatcttctttgtactggagctgctgcatgcggtggcggagagtgccattacaccggcgagcacggcagcaaggattttcttcattttcatgtgttttgtccttctttctcaattttccccgataaagagatacagtcgtttcactgtaccaatcgattagaatacttgtattctacccccaaaacccgtttgggtcaatagcgaaactgccaaattaatgtatatttatacatatatacataggtatttttcaagatttgtgggtaaaatcggtgtttttacttcaacgtgacaatgacaagctgattcgagacatacggttccgtaaggtcatacgcggcctgacgttccggcgtaatggacacggacgagatgatgacgtcgtactgctctttatcaaggcccgcaaaaatgccgtcccacgcggtgttgacaaactcgatgtctacgcccagcacctcgccgagcgcttttgcaaagtcgatgtcgaagccctgatattcaagccctgcgtcatcggtgtactccatcggcgggtagccgacttccacgccgacggttaaggtgccgtccttgagtgttttaagcttagaaaggtcaagcatcggcttttccgtcacattgcgtatgccgtccacatcggcggcggagccgaagtgcttttcggaaagctgcgccatggtgccgtcataatataaggtatcaatcgcgccttcgatgagctctttcaaatcgtcgttgccctttttaagacatacgccgattggctcgccggtttcgctcgtccatgttttctggtatttcgtgtcgtcctccgcgaggtagtaacccgcaacgacgctgtccacgtacacggcatccacgcggccgagtgcgaggtcgtcaaagcactgcgtcaccttttcgtacggcagcacgttgatgttcatgccctcgtcctgcatatcctgaatgctttcgtgcgcggaggttgccgtctgcacggaaattttcgcgccctcaaagtccgccgggctttcaatcttcttcgtactgcccgaacatgccgcaagtgagagcatcatagcgccaattaaaaatgaagcgcaaaccttttgaattttcattttacattcacccttccgcaatatacctttaagctttggcttgtataattttgaagatgaatgtattttacgccgatttcattcaaaaatcaagcggaataatgcacaaactaatgtatatttatacgtatatacatggtgaattttgaaaaagaaaagcctgcgttgtgcagggtctcaaaattagagttgcataacgcaggcttttagaattcggtttagtccatgtaaccgccttgcatgggggagtgtgccgtttgcgtgaagcgttttaaaacgccgtgcgtgtagcggctcttaaacggtggcagcgctttgcggcgctcgttaaacacgtgctgcacttcttcctcgctgcatttttcgccgttgataccgatgacgcgcagaatacgctgcggaatgtcgatctcgataaggtcgttttcttcgattaaagcgatggggccgccctgtgcggcttccggcgaaatatggccgatggcgggacccttgcttgcgccggagaagcgaccgtccgtcagcagtgcaatgctggcagaaagctccgggtcgctcgaaatggcttcggtggtgtagaacatttccggcataccgctgccgcgcgggccttcatagcggatgatgacggcgtcgcccggctgaatttggtgcgttaaaatggcgtggatggcatcttcctcgcagttgaacgggcgcgccttcagaagcgccttgtgcatctccttcggcacggcactgtgttttacgaccgcgccgtccggggcgatgttgccgcgcagaatggcgatggcgccgttcgtgccgatgggatcatcgaacgagcggatgatatccgtgcgcttgagaccggttttctttaaataggtatcacacttctcgtagaagccgtttttctttaaatcttccagattttcgccgagcgttttacccgtgacggtcattacatcgagatgcaggtggtctttgatttcctccatgatgcgaggtacgccgcctgcataatagaagtactgcgcgggccactcgcctgcgggacggatattcaaaagataatgcgcgccgcggtgcatgcggtcgaatgtatccgcgtcgagcggaatgccgaactcatgcgcgatggcgggcaggtgcatcagcgtgtttgtggagccggagatggccgcgtgtaccatgatggcgttttcgaacgatttcagcgtgacgatatcggacgctttcatgccctttttcgcgagtgccacggcggttttgccggcttcctccgctgcaacggaaagatcttcgcaggtggcgggcatcagtgccgtgccgggcagcatgaggccgagcgattccgccataatctgcatggtggacgcggtgcccatgaacgagcatgcaccgcaggaggggcacgcgtggtgcttgtaatacgtgaactgctcctcggtgatctcaccgcgctcatacatggcgctgtatttgccgatctgctccagcgttaaaaggtcgggacccgcgtccatcacaccgcccgtcacgaacacggccggaatgttgatgcggccgatagccatgagcagcgcaggcacggatttatcgcagcttgcgaggaaaacgccgccgtcaaacgttgtcgcgttggcgtgaatttccacaaggtcggcgatgatatcacgcgagggcagggaataattgatgccatcgtgcccctgtgccatgccgtcgcaaatatcggtcgcaaagtaaagcgcgcccttgccgcccgcttcgtatgcgccccggcttgctttctgcgccaaatttagaaggtgcgcggagccggggtggctctgcccgtaggtgctttcaattaaaatctgcggctttgtgaggtcctcctctttccagcccatgcccatgcgcagcgggtccatttccggcgcaagcttgcgaacttcctgacttttcaacatgttgattccctctttgatgataactttatgcggcagcgaatgcgccgatctcaaaatcggcataggtgccgtctttattttgctttgcagtgcagtctaaaaagtaagaggcgccgtccccggcacgccatttttcggcgtcaaacgtcagtgtgccgttttcatcgtttttctccgtgatcttaaataagcagccgtcttcccacaaaagctcgtccgtttctaagtagccctcgtcttgcagctccttaaatgtgaacgtgagcgggcggcgctcggtaagctcgccgaaccgccatgcgatcgcctgtatctcgcctttcgtcaacggcgtctcggtcaagtcaacggagacatattcggtgtcgctttgcagcgtttcgtccgtgttgaataattcctgcagcacggacaaatacagcgcgcatcgcccgtccgtttcattttcgcgtacggtgattttctgcacgttatcgggctcgctcgggtaaatggctttgatatatccgccgtaggtgacgtccaccatcataccggggatgaggtcattcggcgcgtcctccggctttgcgcagcggtacacgccgtcgtctttaccggcgagcaaaagcagattgcccaaaatatcgacgaggcgtgcggtgagcgtcgcagtctcggcagcgctcggttctgatgcggtgctttgcggttcatctacgccgcccgaggatgccagtgagctttggcacgcggtgaaaagcagcagaaaacacaaaagaaaagcgaataaatgggtttgtaaacgagtcataaggccaactcctttcactttatacgtaggaaaaggggttcatttggttacaaaatcatcatagcagatttggaagtctgttacaagatacaaatactttttgttttgacttttgtgcttaaattgtctatactgtgtacaagttgacaaaaagggagcgaaagctatgcggcaggtagttgtaaatgatttggtattcggcagcggcagaatgaaaatttgtgtgccggtgtgcgagaagacaacggaagcggttttagacgccgtaaaagaggtcaagaccaccccggcggatcttatcgaatggcgcatcgattattttgacgaggatatgtttgcggccgcgccggaaatttttaaagcggctgcgccgttgcccgtgctgtgcacattccgcacaaaagcggagggcggcgaaaaagcgatagatcccatggactattttgcgatgaacgcgcagctgagcgccttgggtgcgccgcttgtcgatttagagcttttcctttgcgagcagtacgatgacattgcaaaggcgaccgttcaggctatgcacgatatgggtacgaagcttattatctcgaaccacgattttgccaaaacgcctgcacgcgaggaaatcgccgaccgctataagcgtatgatggcgttaaatgccgacctgccgaaaatcgccgtgatgccgcagaatgagcgcgatgtgatggtgatgctggcggcgatgaatgaatccactgcgttctgcgggccgctcatcggcatttccatgggcgagttcggcaaggtgacgcgcgtgcgcggcggggcgttcggctctgtgatgacgtttgcgtcaaaaggaaaagcctccgcaccgggacaaatcgatgcagagactttatctaaaatgctgaatgaaaattaaattttaaaagtgcttttcaagcgtaaacacggttttcacttcgccgacgggtgtgtcgttgtcgttgacggtgacgccgttgttaagcgagacgagcatcttatcggtatcggcgttatagtagccgatctggcagaagatctcgcggatgatgagcggccagaccgcctcggtgccgtccttaatcttgaaggagatgccgatgcgctcctttttaaggccgatgccgtacacgccgttcgcgccgccctttgcgatgatgttcgcatcgtggttgatgagggagcacaggtagcccgtgccgcgcatcatgtgcggatattcatggatacgcgggacaaagcggcgggcagcgtcctgcagaacgtcgtcctgaatggtatcgatgcacgcgaggttcttatatgccgtcgcgatgttcttcatcgggtaagcgaacaccggcacgccgcagccgtcgatgccgatgacgaccttttcttccgggtactcggagagcacgctcatggtgcgcagcacttcgttctgtccgacggagccgaccttccagtaatccttcacgtcgccgcccatttcacgctgggtgagcatgagcgccgcgtgcttgccgctgcagttgtggtagagcttcgacttcggcagaccctgacggatgcgttcttcgtttgcttccgtagagcccggcacggtcggcttcatgatgaggtcttccggatttaagtcggcctttttcatgatggatttcaaagcgttgacgtggaagctttcgccgagatgcgagcctgcgaacagcacggtttcttcatcggtaaaaccgtatttttcatcgaggtgatgtgcgataacgggcagcgcctgcacgggcttcgaagcggagcggtagaaaaccatggcctccgggtcgcctgcggagtagatgaccttgcccttttcatctacaatgctgatgtagccgtaatgcgtcaggtccaaaagcccgccgcgaaattcttctgttaaacgaacggtatctgacataatctcgtcccctgtctttagaatttaacgatttatctttctttttacgttcaaagctattataatcttttttagaggattgtaaaggcatttgtgtgagaatagtcgaaagtgcagaaagcggcgtgttttaaagcgccgcagataggacaaataaacgaaagttggtataaatatgaaagaaaaagtgttgtttgaggtttgctgtggctgttttgaagacgccgtacaggccgaaaaaggcggcgcagaccgcattgaactcaattccgcgctgtttttgggcggccttacgccgagcatcggcacggtgcaggccgtgaaaaatacactgaaaattcccgtgatgtgcatggtgcgcccgcgcgagggcggcttttgctacacggatttcgattacatgacctgctgccgcgatatggaggcaatgttaaatgcaggcgcggacggcatcgtcttcggctttttgaagccggacggcacggttgacaccgaccgctgcgccgattttatcgggaaaatcaagaaaatcaccccgaacgccgagattgtgtttcaccgcgccattgacgtggtgccggacgtatttaaagcgctcgatgatcttatcagtctcggtgtaacgcgcgttttgacgagcggccagcgtgaaagcgcgataaagggcgcaaagactgtgaaaaagatgatcgaatacgcaagtgaccgcatcaatattctgcccggcggcggcatcaacacgcagaatgtcggggaatttatcaacgagaccggcacgcacagtgtacatgcctcggcgcgctccctgcggcacgacacaagcgtctgcggcaacccggagatctttttcggcggcaaattgaacggcgtgggtatcccggagaacgaatataaggtgacggacagcgctttggtgcaaaacgtcgttgcagcggtcgaagcgcggtaagctttacccggagaaaggggattttaggtgaaaaacgatattgacagcattttggatgcgctgttttccggcggaaagctgaacgtgggcagcggcacgaaaagccgcgccgcaaaagacgccgaggattttttgaacagcatcgaaaaaacgaatgccaacatgcagagcagcctgaatcggcagattagcgacctcgataagctgacgagcgacgcgcagcgcagcatggacgaaatgcgccgtctgctggacgccgagggcctgaccggcacgcccgaaatggaagcaccgaaagcggagaccgcagaaaaaaagccgaaggcaaagggcgcggaggagccgccgcaggaccccgcgcagtcgttccgcgaggcgagggaggcgacgggcagaacggtcattgggcaggacgcatttttggacagcctgttcaccgcatttcgccgcccgagcgtgacggggcgcgaaaacggcaagcccgcggcggtcgtcgtgatttccggcaaagagggcacaggcaggcacagtgcgcttgcggcttcggctgcggcgctctgcaaagaggacgttttgaaaaacggcgaggtcacgaatatcgatctttcccgctacccgaacgccgaagacggcaaattgctcacacaggatcttttttccgcactgcacggcgaaaacgatattgtgctgtttgaaaactttgagcagtgccacaaatctttgctgcccatggtggcggcgctgtgcgagacgggcgttttaaaattagcttcgcgttatgctttgcagaaaggcatgctcatcgatgtcggcacggcgcttgtgcccgatgccgtcagcgaaatttccgtaaacgggaagtacctcgtctttttgacgagccaaaaggacagtgcgttcaccgatgcgttcggcgcggcatttttgtcctccgtcacggatttctgccgcacggcggaattcacgcgcgcgagcctgctcaagatcggcgaagcggcgctcggtgcattaaacgaccgcacaaaggctaagctaaactacacgttcacgttcggtgaagatgcctcggcgtttttggcggataaattcagtcgccgcgacggcgtggagagcatggcgcggctgacggaacgttgcttccgccttttgagcgaagaaaagctgcgtcgcgcggaaaaggacggtgaaaagaccgtttccagcacactcggcgtaaaagacggtgtgctcgcgttcacattcccggattttgccgtcacggtggaagaagagaaaaagcaggcggcagacccaaaagccgccgaggaagtgaagtcggagcttaacgagatcatcggacttagtgaagtgaaggactacgtgctgtcgcttgagcagaactatatcattcagcggctgcgcgaagcgcgcggcatgaaggccgatgtgcccaccatgcacatgatctttaccggcaatcccggcacgggcaaaacgaccatcgcaaggctcgtttcacgctatttaaaagccatgggcgtactgagcggcgggcagctgattgaagtcacgcgcgccgaccttgtaggcaaatacgtcggtcacaccgcaccgctcacgcagcaggtcattcgctctgcgctcggcggcgtgctgttcatcgatgaggcatattcgctgtaccgcggcgcagacgacagtttcggactggaagccatcgataccatcgtcaaggggatggaggaccacagagaagaccttatcgttattttggcgggctatacaaaagaaatggaggcgtttctcacggcgaactccggcctgcgctcgagattcccgaatattatcgagtttccggattatacggcggaggagttgctggccattacaaagctgactgcaaagaaaaagggctatacgatcgatgaaacatgcgaaacgccgctgcttcaatattacgaaaagcggcaggcaacggacgccagaacggcgggcaacggacgcttggtgcgcaatttggttgaggacgcgatcttaaaccagtctcgcagattgacgggcggagacgtgacaaggctgacggaagcggagcttgcggcgcttttaagcgaggattttgacctaagcgaaggatagaaacggtgtgaaaccgcatgaaaatgatgaaagtgtaaacatttatcgatttctcttgcaacttttaaaagaaagatttacaatacaagattggagagaccgaaagtttcagtaaacttccattctgtgataagcgaaagacaaccgagcgaataaagtttcgcccgccttttcaaaggcggcggatcccaagggcatctcctttggtcgctttccgcagaaagcgaattgcgtggccactccaggagcgtttatccaaaccgtaaattattgcgaaagggcatgagaatatgacgaaaatcgatattttttccggcttcctcggcgcaggcaaaaccacgctgatccgcaagctgatctccgaagcttttaagggcgaaaagctcgtcctcatcgaaaacgagttcggcgagattgccattgacggcggctttttgcaggacgccggcattgaaatcaccgagatgagccagggctgcatctgctgcagccttgtgggcgacttcggcaaggcgctgcgtcaggtgctggagacctaccacccggaccgcattttgattgagccgtccggcgtaggcaagctgagcgatgtgatccgtgccgtgcagaacctgcacatggaagacgttacgctgaatagcttcaccaccgttgccgatgcaaacaagtgcaaaatgtatatgaagaacttcggcgagttctataacgaccagatcgagcacgcaaactccatcattctgagccgcacggacggtatcaagcccgaaaagcttgaaggctgcgtcgctctgttgcgcgagcacaaccagaacgccaccatcattaccaccccgtgggatcagctcaccggcgcacagattctcgagacgatggagcacaagaatacccttgaagaggagctgaagctccttgccgaggagaccgagcacgagcatcaccatcaccacgatcatgaccacgaagagcatgatgagcactgcacctgcggctgccacgaccaccatgacgatgatgaagacgagcacgagcaccaccatcaccacgatcatgaccacgaagagcatgatgagcactgcacctgcggctgccacgagcaccatgacgacgatgacgagcacgagcatcaccatcaccaccatgaccatgatgaccatgatgagcatgacgagcgctgcacctgcggctgccacgaccaccatgacgatgacgacgagcaagaccacgagcatcatcaccaccatcatcatgccgacgaggtgttcacaagctggggcaccgagacgacccgcaagttcacgaaggacgagatcgagcacatcctcgaggagctcgacaacagcgaaaagtacggtatgatcctgcgtgcaaagggcatcgtcgcaggccgggacggcgagtggatccacttcgactatgtgccggaggagacctctgtgcgcaacggcagcgccggtgtcatcggccgcctgtgcgttatcggttctcacatcaacgaggccgcaatcgaagcgctgttcgcgtaatgcgggctgaaccttacagaaaggcggaatattgatggatgatatgccggtttacctgtttacgggctttctcgaatcaggcaagacctcttttatagacgaaacgcttgcggataagcgtttcaataacgggcagcgtaccttgctgctcgtctgcgaggaaggcgaggcggagtacgacgagtcccgcccctacatgaagaacatctatgtggaaaacattgaggacgaagacgagctgacgagcgaaacgcttgacatcctcgcgaaaaagcatcgcgcttcccgtgtgctcatcgagtacaacggcatgtggcagctgaaaacgctgtacgacaacatgccggaaaactgggcggtctaccaggaattcatgttcgcggatgcgacgacattcctcacttacaacgccaacatgcgcggccttgttgtggataagctctccggctgcgagttggtcgtgttcaaccgcttcacgaaggacatggacaaaatggcgttccacaagattgtgcgcggcatcagccgccgcccggacatcgcctacgagtacacgaacggcgacgtcgaatacgacgagatcgaagatccgctgccgtttgacatcaacgcgccggtcgtaaagattgaagacggcgattacgcgctgtggtaccgtgacctttccgaagatccgaagaagtacgacggcaaggtcgtcgagtataagggccttgcagccgtgaacccgcgcatgaagccgggcatgttcttcttcggtcgccagctgatgacctgctgcgtggaggacatccagtttgcgggtctgctcacgctatgcgacgcggacaaaatgccggaaaacggaaagtggtacaccatgcgcctttccgttgcgtataagtggcacaagctctacggccgcaagggtccggttctgacgcttcagaacatcgagcctgccgaagcgcccgcgcagcccgttgcgacgttctattaagcttaaattcattgcccgttggcttttcaaaagtcggcgggtaatttttttatttatttttctgtatacggtgtcgaaagtgcgcgatttatggtatactaaaaaatacttaaatatatgaaatgaaaatggtgataactttgcatacatatcagcttgttttgccctgccttttgggtgttgagggtcttgtagcggaggagctccgcgatatgggcgcggaaaatgtcgcgccggaaaacggacgtgtgctgtgcgcaggctccccggagatgatcgcccgcgcgaatatccgctcccgctttgcggagcgtgtgctcgttctgctcggtacatttgaagcgaaaagctttgaaagcctgtttcgcggcgtgaaggccctgccgtggacggagtggatcggccgcgacgacgcatttccggtcaaggggcggtgcttatcgagtcagctcatgagcgtgccggactgtcaggccattatcaaaaaagccgtggtggaaagcctcaaggaggcgtataagctggagcatttcccggagacgggcgcgaactaccagattcagtttttaattatgaaagacaaggtcagcattatgctggatacgagcggcgcggggctgcacaagcgcggttaccgcaaaaattccaacgaagcgcccatcaaagagacgcttgcggcagtcatggcaaagctttcccgtgtgcgtacggacggcacgctcatcgaccctttctgcggttcgggtacgattttaatcgagggcgccatgcttgccatgcacattgcgcccggcctgcgccgccactttgcggcggaaaagtggaaagccgtccccggaaatatctgggacaacgagcgcattgccgcaaaggcacttgaacgccgcgatgagggctttttggcgttcggctatgacattgaccccgaagccgtgcgcctgacgcttgaaaacgcgaagaaagcgggcgttgcgcagtatatctccgcagaagtgcgcgatatcaaggatttcagcaacgacggcccgttcggctgcgtcatctgcaacccgccgtacggcgagcggcttttagacgtgaaaacggcggaggacatctacaaaacgatggggcgcgtcttcacgccgaagcgcggctggagctatgctgccatcagtccggacgagcggtttgagacctgcttcggcaaaaaagccgaccgccgccgcaagctctacaacggcatgatccgctgccagtattacatgtattttaaggcataaaaatgctttaggggagggtacatatgcggaatgtttatatcatcaacccaaaagccggcaagcacgaccataccgtgcagtttatggagcgcatccgcgccgtgcatgccacgcacggggaagagccggaaatttatctcacacagcgcgcgggccatggcgaggagctggcaagagcggccgccgaaaagggcgatgcggtgcgcatttgggctgtcggtggcgacggcacggtgctggaggtcgtgcgcggtgcggagttttacgaaaacgtcgccgtgggcgtatatccgtgcggcagcggcaacgacttcgtgcgctcattcggcaagcgcgaagtgtttttgaacccggaaaatcagctggcgggcaagactgtgtccatcgatatgatccgcacgcagcacggcgatgccgtgaacatctgctctgtgggttttgacgccaaggtggcggcggagatgaattattataagcacctgccgttcgtttcgggcgagcttgcatataccatttcgcttgcaaagtgctttttggggcaccttgcggacaaaatgaccgtaacgttttactatgcggacggcacaaaagagaccgttacgggcgaatttctgttcacgcttgcgggcaacggtcgctggtatggcggcgggtactgcggcgcgccgaactcggtggtggacgacggtctgctcgattttgtgctgatccgaaagcccgcctattcccgcattccgggccttgtgccgaagtataagcgcggtgagcatttaagcaacccggtattttccgacctgctcgtttaccgccgcggcgtgaagatcgaaattcaaagcgaaaatgaagtcgtcagcaatatggacggcttgtgcatcaaggtgaaaagcgaggaatacaacattctgccgcacgcactgaatttcattttgccgcgcggcgcggcattgccgaaggagccgaaaaatgcgcggtgatacactcggaaaagcggaaatcttaacgccgcgcctgcgccttagacgcttttccatgcaggacatgagcggctttctgctgtttgccgccgatgcggataccatgctgcgggcgggctccaagccggtttctacaccggcggaggcggagagtgaattgaggcgcgccgcagacgacccgtatgcctttgccatcaccctgcgcgaaacgggcgaagtgatgggcaagatcaagtaccagcgcgattactgccgctataatacggacagtatttcgattggctacgagctttcgcgccgctaccgccataacggctacatgacggaagcgctgcgcgccatggtgcagaacgcgtttgaagtgatgaacgtcgaggtcgtcgccatcagccactttgtgggcaacgagccgtcaagaaaggtcatcgagcgcgcggggttcatctttgagggcgttatgccgtgcggctttaagcggtttgacggcgaaatttttgacaatgtgtgttactccatcctgcgttcggagtacgatacggggcttatttcgtccgtgcgacgcatgcggtaaagcttacaaataaatgtgcatgcccatattccgtcagaaaattgtggaaataccgcttttttctattgccaatgtacaaaagcagtgctaaaattgaataaactcaaaaactgtgactttgttgtgttttgcaccggcaaagtctgttttttaacgcgaaagaaaggaaggaataaagatggaacagtcttttccgaagcgcccgttccgcacgcacggcggcgcgcatgtgccgcaccacaagaacacggcgcacaccgaaacgcgcgtgatgccgccgcccgatgagatcacgctgcccatgacgcagcacatcggcgcaccgtgtgtgccctgtgtgaaaaagggcgaccacgtgtatgtcggcaccaaagtcgcggacagcgacgcatacgtttccgtgccgatccattcctcggtttccggcaccgtgaaggagatcaaaaaagtcattatgcccggcgggcaggcggtggacgccgtcatcatcacgtcggacgggttaatggagcacgaccctgcggtatgtcccccgccggagatcaaaacgaagcagcagctggccgatgcggcgcgcgcttcgggtctcgtcggtctcggcggcgcaggcttcccggcgcacgtgaaattaaacgtccccccggacaaaaaaatcgatacgctcatcgtcaacgttgcggagtgtgagccctatattacctccgaccaccgcgaggcgctcgaaaacggcaaaaacgtgcttgccggtatttataagatcaaagagattttagacgtgcaccgcgtcatcatcgcgattgaagacaataagcccgacgccatcgaagcgctgatgcgcattgcggatgacccgaaaatggacccgaacgacgaagtgcgcgtgttaaagctgcatgcaagctacccgcagggcgcggaaaaggtgctggtgcaggcggtaacgggcagaaaagttccggcgggcggtctgccggcagacgtgggttgccttgtcatgaacatcggctccgtctcgttccttgcaagctacatgcgcaccggcatgccgctgacgatgaagcgcgtcacggtggacggcagcgccgtgcagaacccgcagaatgtcattgtgcccatcggcacaaaaattcgcgaggtcatggaattctgcggcggctataaggaagaaccgcagaagctcatcatgggcggcccgatgatgggcgtcgccgtgacaaccgacgagctgccggtcttaaagcagaataacgggttactcgcgttcggtgtggaagaagcgcgccttttggagccgaccgattgcatccgctgcggccgctgcgttgcggcatgtcccatgaaccttgtgcccgcaaagcttgaaaaatacgcggagcgcaaggatgtggaaatgctgaaaaaactcgacatcatgacgtgcatggaatgcggctgctgcgcattctcctgcccggcgaaacgccgcatcgtgcaggccattcgcctcggcaaatactatgtaaagaaggaggcggctaaaaagtgaataaattcatcgtttcctcctcgccgcactttcagtcaaaagacaccacccagaccttgatgctggacgtcattttggcgctgaccccggcgatgattgcgtccgtcatcattttcggcttccgcgcggcggttattatcctgacaacggtcgcgtcctgcattttgagcgaatacatatcccgccgcgtcatgaagcgccgccagacggtcggtgacctttcctgcgttgtgacgggcgttttgctcgcgatgaacctgcccgtttccatcagccccatcattgcggcgttcggcggcgtcatcgccattgttgtcgtaaagcagatgttcggcggcatcggacagaacttcgtgaaccccgcgctgacggcgcgtatcattctgatgaactcgttcccggcgaaaatgaccgcgtggacggcgccgatggaccacagcttctccgacgccatgacgaccgcaacgccgctcggcgttctctccgagggcacgggtgcggcgctgccgagctacctcgatatgtttctcggcaacacgggcggctgcctaggcgagacctgtgcactcgcactcatcctcggcggcatttaccttgttgcacgccgcgttatcagcccggttatcccggtcacgtaccttgcaacggcagcggcgctttccgcactgctcggccgcgatccgctgatggatattctttccggcggcctcttgctcggcgcgatttttatggcgaccgattacaccacaagccccatcaacttcagcgcacgcgtcatctatgccgtcggctgcggcgtgctgacgattttaatccgccagttcgcgtctctgccggagggcgtatcgtactccatcgtactgatgaatattttagtgccgctcattgagcgcgttgcgaagccgcagacgttcggcaaaatgaaggcaaagaaagcgggtgacgcaaaatgaagatcaccgcgaaagatattttaaaaccggcgctcattctgtttgtcatctgccttgtcgtcacggcgcttctggcgggcacgaacctgctgacgaaggataaaattgccgagcagtccgcactggaagcggagcagtcgagaaaagtcgttttgagcgacgcggacagctttgaagaagcggacggctattacatcggcaaagcgaataacgaaacggtcggctacgttttccaaacggaggcgaagggctacggcggtgcggtgaaggtcatgaccggcatcagcgccgacgggcagatcaccggcgttgtcattctggagcacagcgaaacaccgggtcttggcgcgaacgcggaaaaggcttcctttacggatcagtttaagcagactgcgccggaaaagggcatcacgcttgtgaagaataaggcgccgtcggacggcgagatcgaagccatgaccggcgcgtccatcacgagccgcgcggtgacgaacgccgtcaacgaagccatcacaaagtacaacacggtaaaggagggcgcataacatggcaaaaagcctcaaagaagaatttacaaaaggcattatcaaagagaaccccgtgctgcgcctgatgctcggcacctgcgcgacgctcgccgtcacaacggcagcctcgaacgccatcggcatgggccttgcgacgacattcgtactcgtatgttccaacgccgttatttctcttctcaaaaaaatcatcccggataaagtccgcatcccggcgtatatcactattgttgcgggttttgttaccattgtgcagctgctcatcaaggcctacgtgccggcgcttaacaagtcgctcggcgtgttcctgccgctcatcgttgtcaactgcatcattttgggccgtgcggaaatgttcgccagcaaaaatcccgtgctgccgagcatcgtagacggtcttggtatgggcgtgggcttcaccgccgcgctgctcgccatgggcatcatccgtgaattgctcggcgcgggtaccgtgttcggcattccgatcctttcgaattttatggatcccatcatcattttcctgctcccgccgggcggcttcttcgtgttcggtattctcatcgccattgcgggcaagctttccgcggagggcaaagcaccggagaccatgggctgcgctgcatgcccgttggcggcttcctgctccaaggttcaggaaaaatgtgaaaaggagggcggcaaagcatgagtcttaaatttttagtcggcattttccttgccgcaatcctcacggagaactatattctcaataagtttctcggcatctgtccgttcctcggcgtttccaaaaagctcaatacggcgttcggcatgagctgcgccgtaacggttgtcatggttatcgcgacggcggtcacatggccggtgtatacgtatgtacttgtcccgctgaacctcgattatttgcagaccgtggtgttcatcctcatcatcgcggcgctcgtgcagcttttggagaccgtgatgcacaagtatatgccgccgctgtataacgcgctcggcatttacctgccgctcatcacgacgaactgcgccgtgctgggcgtgacgatgctcgtgctcgaaaaaggcgcggaaaacccgagcttcggctatttggcatcgcttgtcaacgcgttcggcgcaggcatcggcttcatggttgcaatggttattttcgccggtgtgcgtgagcgcctcgagctgtgcgacgtgccgaatttcctcaaaggtctgccgatcacgctgatcgccgcatcgcttgtggcggtttcgttcctcggctttaacggcattatagaccgtctgctcgcctgagcaaaacgaaaggggtttctatatggataaaattttgatcccggttctgatcgtcgcgggcatcggtcttctggcgggtattattctggcggtcgcctccgccatcatggccgtgccgaaggacgagaaagcggaagcgattttagaggtgcttccgggcgcgaactgtggcgcgtgcggtttttccggctgctccggctatgcggcggcgctctctaagggcgaagcgcagcccgggctgtgttctcccggcggcgaagcgtgcgccaaagcgtgcgcagagctgcttggcacgggcgacgttgccgtcgagaaaaagacggcgcttgtccactgtatgggcagctatgactgcaccagcgacaaaatgcgctatgacggcatcgatagctgcgccgcatctaccctgcttgccggcggtatctccagctgccgctacggctgcatgggcatgggcgattgcgccgccgtgtgcgaatacggcgcaatcaacgtctgcaacggcatggcgtcaatcgaccccgcaaagtgccgcggctgcgcaaaatgcaccgctgcatgtccgaaggggctcatcagctttgtgccgctgaaaaagcaggcggtcgtgcgctgctccaactgtgataagggcgcagagacgatgaaggtctgcaaggtgggctgtatcggctgcggcaagtgcatgaaggcgtgcgaagtgggcgccataaaggtgacgaacttctgcgcgaaggtcgatcccgcaaagtgcatcggctgcggcaaatgtgccgaggtctgcccgagacacgtcatcaccatgctggacacataatttttaaaacaaaccgagcctcggctgtacgccggggcttttttgttgtcaaaatttgcaatccgctctttacaaacctctgaaaatccgttatactatacaaaacacggttcaccaaagttttttctgcggtgcgccgcaaaacagctttttcgttctgagcacaaggcatcgccgcgtgtaagccgaaaatggatagaggtatattccgcagatagattctgcgttttttgtgcttcctgcattttcggcagggagcatttttgttttgcttgttttataaaaacgggaggtgttttatgcagacacgcgtagccgtgatgagcattattttagaagataacgcccacgcggaggaaatcaacgacattctgcaccagtacggtcggtacatcatcggacgtatggggctgccgtacagacagaaaaatatcaacatcatctgtgtggcggtggatgccccacaggacgtcatcagcgccatggcgggaaagctcgggcgcgtgcgcggcgccaacattaaaacggcgtattccaatttcacgagcacagagccggaaatcaaaacggagtgatccgaaaaaatgactaacgggaaagtgaactgacccgaaagaaaggaaattatcaaactatgtacgatccgaaatccttaaaagcagaggaatttatctgccacgaagaaattgaagacactttaaaatacgcggacgagaacaaagataacatgccgctcatccgcgaaattctcgataaagcccgtctgtgtaagggactttcacaccgcgaagcatccgttctgctcgcctgcgaagacccggagattctggacgaaatctataagctcgcaaacgagatcaagcacaagttttatggcaaccgcattgtcatgtttgcgccgctgtacctttccaactactgcgtgaacggctgcatctactgcccgtatcaccgccagaaccatcacatcccgcgccgcaagctgacgcaggaggaggtcgcaaaggaagtcattgcgctgcaggacatgggtcataagcgccttgccattgaagccggcgaagacccggtgaataaccccatcgagtacattctcgactgcatcaagaccatttacagcattcagcataagaacggcgccatccgccgcgtgaacgtcaacatcgccgcgacgaccgtggaaaactaccgtaaattaaaggaagccggcatcggcacgtacatcctgttccaggagacctaccacaaggaaagctacgaaaagctgcatcccacgggcccgaagcataactacgcctaccacaccgaggcgatggaccgcgccatggagggcggtatcgatgacgtgggtctcggcgttctgtacggccttgaaatgtaccgttacgagttctgtggccagctgatgcacgcggagcaccttgaagccgtgcacggcgtaggcccgcataccatcagtgtgccgcgcctcaaaaaagccgacgacattgacccgacgaagttcgataacggcatcagcgacgaaacattcgcgaaaatctgcgcacttattcgtatcgctgtgccgtacaccggcatgatcatctccacgcgcgagagtcagaaggtgcgcgcgcaggttatcaatctcggcgtttcgcagatcagcggcgcatcccgtacctccgtcggcggctatgccgaagaggagcgccccaccgacaccgagcagttcgacgtttccgatcagcgttcccttgacgaggtcgtccgctggctgatggagaccgaccacattccgtccttctgcacggcatgctaccgcgagggccgcaccggcgaccgcttcatgagcctgtgtaagagcggacagatccagaactgctgccacccgaacgcactcatcaccttaaaagagttcctcgaggactacgcttccccggagacgaaggccatcggcgaaaagatgatcgcgcaggagcttgaaaatatcccgaacgagaagacctgcagcatcgcaaagggctacgttgaaaaggtcgcccacggcgagcgcgacttccgtttctaaaactttcggttattctttaaaaggcaggcgacttctatggcagacctcaaccagaccccctcggcaaaccgtgtgcacatcgcatttttcggcaagcgcaacgccggtaaatccagcgtggtgaacgccgttacggggcagaatatctccattgtgtccgatgtcaagggcaccacgaccgaccccgtgcagaaagccatggagcttttgccgcttggcccggtcgtcattatcgacacgcccggcatggacgacgagggcaccgtgggcaagctgcgtgtgcagcgcgcccggcaggtactcaataaagctgatattgcggtgctcgtcatcgacggcacggtcggcaaaagtgcggaagacctcgtactgcaaaagctcatcgagaaaaaaggtgtgccgtatatcatcgtattgaataaagccgacctcggtgagttcaaggccgaaaacgacaacgaaatcgcggtcagcgcgaagacgggcgagcatatttttgaactcaaggaaaagcttgccgccatcgctgcaaaggggcagaacaccaaagttattttgggtgacttacttgagtgcggcgaccacgtggtgctcgtcacgcccatcgattcctccgcgccgaaaggccgcatgattttgccgcaggtgcaggccatccgcgacattctggacgcaggcgcaacatgctctgtcacgcaggtggaagagcttgcgggcgtgctgaacggcctcaaaacgccgccgaagctcgttgttacggacagccaggcattcggcaaagtaaagcagatcgtgcccgagcgcattaagctcacgtcattctccatcttatttgcgcgctacaagggcgttttagagacggccgtgcgcggcgctgcggctattgagaatctgaaagcgggcgaccacattttgatttccgaaggctgcacgcatcaccgccagtgcggcgatatcggcaccgtgaagctgcccgcgtggatccgcaaacacaccggcaaggactttgaattcgagtttacctccggcggcggatttcccgaagatctttcgccgtatgcccttattgtgcactgcggcggctgtatgctgaatgaacgcgaaatgcagttcagacagtcttccgccgaagaaaaaggtgtgccgtacacgaactacggcattctcattgcatatatcaatggcattttaaagcggagcttagccccgtttgacgaatatgcctccatgatttaagctgtcatttgcaaaagacagtcccggctttcaaacgagcgcggggctgttttttgtcgttttgtgggtggttttgtatgaaaaaagcggacatcagaggacatcggaggacaaaattattacggaactgttaaaagtcaaaaaaatcgcgtttttcctattgacttttcttgaccaagtgattagaataggtttagcactcggggataaggagtgctaaagcgtaagcggcacagctccccgagacctaaacttgtatttctttaccgaccgggccgcaccccggcgggtttcgcggtgcaccccgctgtacgcgaaaaacttatttatgaactgcggggagaaaggatacggcgcattaggcgccgaggtggaagttatgaccattaagcctttgacagacagagtactcattcaggccgagaaagcggaggagaccacaaagagcggcatcgtgctgacaagcgcggcacaggagaagccgcagatctcccgtgttatcgcagtaggccccggcggcatggtagacggcaaggaagtcgttatgcagcttaaggccggcgaccgcgtcatcaccggcaagtacaccggcacggaagtgaagatcgacggcgaggaatacaccatcgttcgtcagtccgacgttctggcagtcgttgagtaatttgagtttcagtctttattcttgatatttggaattgtgaggtaatttactatggcaaagcagatcatttacggcgaagaagccagaaaagcattgctcggcggtatcaacaagcttgcagataccgttaagatcacccttggcccgaagggcagaaacgttgtgctcgataagaagttcggcgcaccgctcatcacgaacgacggcgtgacaatcgctaaggaagttgagcttgaagacccgtttgagaacatgggtgcacagctcgtgaaggaagttgcaaccaagacgaacgacgttgcaggcgacggcaccacgaccgcaacgctgcttgcacaggcactcatccgtgagggcatgaagaacgttaccgcaggcgcaaacccgatggttctgagaaagggcattcagaaggcgaccgagaccgctgttgaggcgattgagaagaacgccaagaaggtctccggcacgaaggacattgcacgtgttgcggctgtttcctctgcaagtgagcagatcggcaacctcatcgccgacgcgatggaaaaggtcacgtccgacggcgttattaccgttgaagaatccaagacggctgagacgtacagcgaggtcgtagaaggcatgatgttcgaccgcggttatattacgccgtacatggtcaccgataccgacaagatggtcgctgtcatcgacgacgcgtacatcctcatcaccgataagaagatctccaacattcaggagattctgccgctgctcgagcagatcgtacagtccggcaagaagctcgtcatcatcgcggaggacattgagggcgaggcgctgaccaccctgatcctcaacaagctccgcggcacgttcacctgcgtgggcgttaaggctccgggcttcggcgacagaagaaaagaaatgctcaccgatatcgcaacgctcaccggcggccaggtcatctccagcgagcttggtcttgagctgaaggataccaccgttgatcagctcggccgtgcacgtcaggtcaagatcgacaaggaaaacaccatcattgttgacggtgcaggcgacagcgaggccatcaagagccgtgtcagccagatcagaagccagatcgagaccaccacgtccgatttcgaccgtgagaagctgcaggagcgccttgcaaagctcgcaggcggcgtagcggttatcaaggtcggtgcggctaccgaggtcgaaatgaaagagcagaagatgcgcattgaggacgctctggctgcaacgaaggctgctgttgaagagggcatcgtcgcaggcggcggcaccgcactcatcgatgcgattccggctgttaaggcctatgttgattccgttgacggcgacgagaagaccggcgctgccatcgttctgaaggctcttgaggagccggttcgccagattgctgcgaacgcaggtctggagggctccatcatcattgagcacctgaaggcaaagaacaccgtcggctacggctacaatgctctgaccgatacctacggcgacatgatcgacgaaggcatcgttgacccgacgaaggtcacccgttccgctctgcagaacgcttcctccgtggcttccaccgttctgaccaccgagtccctcgtggcagacatcaaggagccggctgcacccgcagctccggcagcaccggacatgggcggcatgtactaatgaagagcgcttaaaccgcatgaaaacgtcataaaacgttgatcccccgcacaggaaattccctgtgcgggggatttttgtaggaaaacacaagtttgtgcgatgaaatatgggattccgccgattgacaatgcggtacggttttgatactattacagtagataaatatttaacaataccgaggcgggtacgatttcggtacgttcaaaaaagccttggtacggcggatttttaagccgaaaaaaggaaaggtgatcgtatgaaaaagtatgtaagcttggtgttgtgtctgctgcttgcagcgctgctttttacgggctgcgcgggcggaaacggcgggtcttccggcggaggaaagacatcggacgcggcggtgaatgaaacgctgctcggatgcttcggaaagtctgcggatgaagccgtgaaggcgctgggactgaaggacgaccaaaaggccggcgactacggctacacgctggactacgcgtggggtgggcaaacgatggaaacgaatcttgccacaaactacggtggtgcgggtgtgttcggctatgcggaagcgcagaaggtgtttgaaaacagcgatgcgggcacggcagaaattaaagcgtttgtggagaaattcacggcgcagtttaacgacccgtatgccgtgacgcgctacacgcaggcggaaaagacgaaagaaacgtatgacgcggcgcagcttgaaacgtatttgaaagacgtggcgggcggcgaaagcggcagcggcgtgcagttccggttcagccttgtgggtaaaaacgaccgcatgagcgacgacggcgattatattgaagtttccgtacagaacacaggcgacgggctgcgcgtgaagctcagcatggagcatgtgaatcgataaggatattgaagccgcgctcggcagaatcgggcgcggtattttataatctgtgtaaaatatttttccggggaaaaaacctcttgcatattttatgaaaatccgatatgatgaggatagggagcgcgggcgcctgaacgggtcgggcgcgtgtatgcggcttccgctttgagaaagggggaatgattttggaaaccatgatctgggtggcggtcattgtgattgctgcaatactggagggcatgagcgcgcagcttatttccatctggtttgtgggcggcggcatcgccggcatgatcgcgcagctgtgcggcgcgccggtttggctgcaagtgctgattgccgctgtggtgacgctcgttctgcttttggcaacgcgtccgctcgtgaaaaagttcctgcaaaacaaggaaacgcacacgaacgccgaccgcgtggtggggcagaccgccgttgtgacggaggatatcgataaccttgcggcgcatggacgcgtggaagtgctcggcaacgactgggcagcacgcagcacagaaaatgtccgtattcaaaaaggcacaaaggtgcaggtggtgcgcattgagggcgtaaagcttatcgtgacaccggttgtatcttaaattcggcaccgtaaagtaaaaatggaaagacagctcacgaaatcataggaaagcttcacgcaacgagcaaaaactcccgttttctttgttttgataaattcaaaccggcgacctgagccggggtagaccgtttagagcagaataacgcatacgcttaaaatcgtgttttccgaaaagatttgacatagacggagctgtaacggcagcggatttccatacaaaaaaggaatagttgcactttttgtcagtgcagcggtagttggagtaatgctcataatcgtgatgcagaaaggaagcctttccgcacacagggcaaggcggatgtttccgccgacaatttgccccctccgacctcggtcgatcgggtgcaaattgatgttggcaggttcggcagagatacttctgatacccatcgggatctttgccgtaacgataaaatgaatgatcgttgttgcattttggacactgaatgtgatatgatttcatcagagaacctttcctttcttttgggagtaaatgcgttttacggtgaaaccattataccaaaagggacgagaggttctcaactttcatttaagtttacaatacggacgaaaaaaacaggaggaaaaattcatgacaaagttatactatcagtttccaaacacctggttcggcgactgcatgccttttggaaaaggagatcagttttatctgtttcaccaaagagataccagaaaaccctgcccgtttggcgaaccctttggctgggatctggcggtgacttctgattttgtgcactatgaggataaagggacagcgctcccgcggggaaccgacgaggagcaggatcagtttatttttgcaggaagcgtttttgaagcagagggaaagtatcacattttctataccggattcaaccgggactatccaaagcttggcaaggcatcccaggtgctgatgcatgcggagagcgatgatctgctgaactggaccaaggcccaggacaagctgacttttacaccgcaggagggttatgacccggatgactggcgggatcccttcgtgatctggaatgaggaaaaacaggaatacctgctggttttgggaaccagaaaggccggacccaaggaacagcagaccggacgtaccgtaaagtttacctccaaagacctgaaaaattggaaatttgagggagatttctgggcaccgggcctgtttaccatgcatgaaatgccggatctgttccagatcggtgactggtggtatcacattatttccgaatacagcgacggaaataagatggtgtaccggatgagcaaaagtctggatggtccatggatcgctcctgcggacgatgcttttgatggacgtgcttactatgcgggcagaaccttctgcctgaacgggcagcgcattctgtttggctgggttcccacgaaagagaactgcgatgaccgtggaaacttcgagtgggcaggcacatttgtggcacatgaggtgtatcagagaggggacggaaccctgggcgtcaggatccccgacactgtatggaacgcctttgaggagggagagaaagctgaagatatggtgatcgataccccttatgccagacaggaacagatacttttcaatgatactacagacctattccgctttgaagcagatgtggaattttccgaaggcacccgctcttttggacttcgcttttatgaaaacgaagagaccggtcagagctatcagtatttatttaatataaaagaaaaccgttaccgctttgaaacgagtcccaacatgccctggcctgcaaaccagaacatcggactggaacggcccatcagactggaagcgggaaagaagtaccatatccaaatgatcctggatgacaccatcgcaacgatctatgtggacggagtggctctgaatacacggttttatcagaaatttggccagtccctcagtctgtttgtgacagacggaacgctgacagtaacaaatgcaggcctgtcaaaaaccataaaatgaatagtgattgacattcccttaaattgaaactggaggtaaaaacatggattttgaactgtacatcaactggggcgttgtaggcattatcgttctcatcgctcttgtcatcgcgctgcttgcggcgaacattaaggtggtgccgcaggcgcacgcattcgtcattgaaagactcggcgcgtaccacgccacgtggagcacgggcctgcatttgaaaattccgtttatcgaccgcattgcgaagaaggtctcgctgaaagagcaggtcatcgatttcccgccgcagcccgttatcacgaaggataacgtcacgatgcagatcgacacggtggtgtatttccagatcacggactcgaagctgtatgcttacggcgtggagcgcccgatctccgcgattgagaacctttccgcaacgacgctgagaaacatcatcggtgatatggagcttgaccacacgctgacctcgcgcgatgttatcaactcgaaaattcgcgtcattctggatgaagcgaccgatgcgtggggcattaaggttaaccgcgtggagctgaaaaacatcattccgccgaaggaaattcaggattcgatggagaagcagatgaaggcggagcgcgagcgccgtgcgaagattttggacgcagagggcgaaaaacgcagcgccatcctcatcgcggaaggccagaaggaatctgctgtcctgcgcgcggaggctgtgcgcgagacgaaaatcagagaagcacagggtgaagcggaggcaatcctctccgtgcaacgtgcgttggcggattccattaagcttctcaacgaagccgatccgaataaagctgtgctgaccttgaagagctttgaagcgcttgagaaagtagcggacggcaaggcgacgaagattatcattccgtccgagattcagggtatggcaggcttagccgcaagcgcgaaggagatttttgcgacggaaacgccgaaggagtaaaatagagtttacggcgaacaagacgtaaaagtctttcgtcaagttttcttcggaaaacttacgggttcttagggcagcgccttgagtcgccattcgcaaatggcgaaatacctttgccgctaatacaatttatcctctcccggcgcagccgggagaggattttttctattgagcttgcgttttcaaggtgatttgcgcgacttgtgtatataaaagctctctgtatatctccctcagtcagcttcgctgacagctccctcgtcagagggaacttggaaagctgccttttttgacgaatagagggcaataatgtacgtaggtaaagtgaaaatacccttttgcatttcaaggtgtgctgctatgtatttgatatatggtgagacggaagcggagaaaggggacatatcgaggtatacaacgcatgtccacgagcaggggagaattttggatttttttctaaaaacggcaaaaactattgaaaaaacgcgttaaatcccgtaaaatgataaaggcaacaacgtataaagtacgcctacggcttggcacgcaatttgcttgcatttttccgccataccgaccgtaccccccttgccgggcgtcagcctgcctgtgggtgttccgtgcagcctgacggaaaatctgacggcgcagcttgtgcaccaacgttatacattgctgccttaaaggtctgcttaatggattgatttatcagtcgcttgagacagactaaggacagaaaattcaaggctgcaagtgccggaggtgcgatatggctgaactgatgtgcatttttactgtatctgcatgggcgttttgcggtcaattttagaagcataggttgtgttttttgagcacagcctattttcttttttttcgcggtgctttcttttacgccgcaaatcttgaaaggatcggtgattttcaatgagcaaaaaagttgcagtgatcatgggcagtgacagtgattttccggtggtttccccggcgattcgcagattgaagcagttcggcatcccggtggaggcgcgcgtgatgagcgcacaccgcacgccggaggccgcggcggaattctctaagaacgcggaaaaggacggctttggcgttatcattgcggcggcgggcaaggctgcgcatcttgcgggcgtgctggctgcgcacacgacgctgccggtcatcggcattccggtgaagtcttccacgctcgacggccttgacgcactgcttgcaaccgtgcagatgccctccggcattccggtggcgacggtggcgattgacggcgcggacaatgctgcgattttggcggcgcagatgctggcgctttccgacgagagcatcgcaaagcagctgcaccagatgaaggtggatatggagcagggtgttgcgaaaaagaacgaagccttacagcagaaagttgccgagctataattcgggagggataaacgatgacaaaatcgattttgagaaagtacgcaaagctcatcgttcagatgggcgtgaacatcaaaaagggtcagggcgctgtaatcttggcggatacggcgcagtctgagatcgcactgatggtggcggaggaagcctaccgcgccggtgcgaagtgggtggacatccgctggacgaatcaggaccttgacaagatgcgctataagaaagaaagcgtaaaggtgctttccgctacgcaggagtgggaaaaggcgcgcatgcagtatgagcttgacgagctgccggtgcgcatttggatcgactctgacgacccggacggcctgaagggcgtgaacgttgagaaaatgcagaaggcgaaccttgcccgtatgaaggtgagaaagccgtaccgcgacgcgatggaaaacaagtaccagtggacgattgtcgccgtgccgagtgcaaagtgggcgaagaaggtgttcccgaacgaccgcacgagcgtggcggtgaagaagctgtgggacgcaatccttcagacggtgcgtgtttctaaggataacgacccggttgaagcgtggaaagcacacaacgcttccctcaaagcacgctatgagaagctgaacgcatgtcactttgagagcctgcactattttagcgagaacggcaccgatttcacctgcggcctgatcccggacgcacagtggatgggcggcggcgaaacgctgctggacggtacattcttcaacccgaatatgccgaccgaagagattttcacctccccgatgaagggcaaggcagagggtacggtcgtttctacgatgccgctgtcttaccaaggcaatttgattgaaaacttctccattacgtttaagggcggccgcgcggtctcctgcaaggcggaaaagaaccaggagcttttggagcacatgattgcgatggacgagggcgcggcgcagatcggcgagctggcgcttatcccgaacgactctcccatctcgaacctcggcattctgttctacaacacgctgtttgacgagaacgcttcctgccacattgcgcttggcttgggcttcccgaatgtcatcaaggattacgacaagtatacgcttgatgagattcacgacaagggcgtgaacgattccgtcatccacgtggacttcatggtgggcgacgcgacgatgaacattgacggcatcacgccggacggcgaggttatcccggtgttcagaaacggcaattggacagagaaattcatgtaattcattttatagataatttaaagaaagagagaagttaaagaatgaaaagttacagcgatagctacaaggcagcgggcgttgacgttaccgcaggctacaagtccgtagagctgatgaaagagcacgtaaagcgtacaagcattccgggcgtggtttccggcatcggcggtttcggcggtcttttccagccggacatgaccggtatgaaagaacctgtgcttgtttccggcacagacggcgtgggcacgaagctcgtggcggccatgctgctcgataagcatgacaccattggcattgactgcgttgccatgtgcgtgaacgacgtcgtatgctgcggcgcaaaaccgctctttttcctcgattacatcgcctgcggcaagaacgtgccggagaagattgcagagatcgtaaagggtgttgcggagggctgcgtgcagtccggctgcgcgctcatcggcggcgagaccgcagagcacccgggcgtgatgccggaggacgactatgacctcgcgggctttacggtgggcattgtagataaggataagatcattgacggctccaagatgcaggcgggcgacgtgcttgttggcgtggcatcctccggcgtacattcgaacggcttctctctggtgagaaaggtgttcggtctgaataaagaaaagcttgaaacgtattacgaagaactcggctgcacgttgggcgaggcacttctgaccccgacgcgcctgtatgtaaagcctgcgctggcggccattgaagcggcagacgtgaaggcaatctcccacattacgggcggcggcttctacgagaacattccgcgtatgatgaagaagggcctcaccgctaaggtggaccgttccgcagtgccggtgctgccgatcttcgacctcatcgcgaagacgggcaacattccggagcgcgacatgttcaacacgttcaacatgggtgtcggcatgtgcatggcggtctccaaggagacggcggacgcggccattaaggcgctgaatgatgcgggcgaaaaggcgtttgtcatcggtgaagtggttgagggcgacgagggggtcatcctgtgctgaacatcgcagtcctcgtttccggcggcggaacgaatttgcaggcgctgatcgacgcggagaaagccggtaaaatcgaaaacggtaaaatttccgtggttgtggcgagcaagccgggcgtttatgccttggagcgcgcgaaaaacgcgggtattgagggcgttgtgttggcgcgcagcgactatgaaaacgtggacgcgtacagcgaagcgctcgaaaacttgctgaaagaaaagcacacggacttaattgttctggcgggctttatgaccattacgaacgagaagttcacgaaggcgtttgaaaataagatcatcaacgtgcacccggcgctcattccgtcgttctgcggcaagggctattacggtctgcacgtgcacgaggcggctttggcacgcggcgtgaaggtctccggcgcgacggtacactttgtaaacgaggtgtgcgacggcggcccgatcatcttacagaaagcggtgccggtggagcagggcgacacgcccgagacgctgcagcgccgcattatggagcaggcggagtggaagattctgccgcaggcagtgtctttgttctgcgcgggtaagctttccgtgaacggctctatcgttacgattaaagaataattcatccctttacatagaaaggaaacggatacatggaaattctggatattaaaaaggaacttgcaggcaacgcatacccgggccgcggcatcgtcatcggcaaaagcgcggacggcgtgcatgcggtcatcgcgtatttcattatgggccgcagcgtgaactcccgcaaccgcgtgtttgtggagcagggcgacggcatccgcacggaagcgtttgaccccgcaaagctctctgacccgtctcttgtcatttatgcgccggtgcgcgttttggcaaacaagaccattgtgacgaacggagaccagacggataccgtgtttacatacctcaaggcgggcaagagcttcaaaaaagcgttgaagacccgcaagtttgagccggacgccccgaactttacgccgagaatttccggccttgtaaagctgaaggacggcgactttacctataagctttccattttgaagagctgcgagggcaacccggacgcgccgcagagttttttcttcgactatacgccggtggacggcctcggccacttcatccacacgtataagtgtgacggcgcaccgcgtatcccgtcctttgagggcgagccgaagccggtgaagattgagggcgacatcgacacgtttacgaatgacctgtggacgaacctgaacgaagacaataaggtctccttgttcacgcgcttcatcaatttgaagacgggcaagatggagacccgcatcgtcaacaagaataagtgatttttcggaggggaaactatgaaagaactggaactgaaatacggctgcaacccgaaccagaagccggcgaaaatttttacgaacgacggtcgcgacctgccgattcgcgttttgaacggcagaccgggctatatcaaccttttggatgcgttcaactcctggcagcttgtaaaagagctgaaagcggcaaccggtatgccggcggcggcttcctttaagcacgtgagcccggcgggcgcagctgtggcaaagccgatgagcgacacgctgaaaaagatttattttgtggacgatctggagctttcgcccatcgcgacggcgtatgcaagagcccgcggtgcagacagaatgtcctcctacggcgattgggcagcgctttccgacgtatgcgataaggaaaccgcaacgctgttggcacgtgaagtttccgacggcatcattgcaccgggctacacggacgaagcgcttgcgattttaaagacaaaacgtaagggcacgtacaatgtcgtcgagatcgacccggattacaagccggagccgattgagcacaaggatgttttcggcatcacgtttgagcagggcagaaacgagctgaaaatcgacgcggacatgctgacaaatcttgtgacggaaaacaaagagattccggaggacgcaaagcttgacttagtgctctccctcatcacgttgaaatacacgcagtcgaactccgtctgctatgcgaaggacggtcaggccatcggcatcggcgccggccagcagagccgcatccactgcacgcgtcttgcgggcaacaaggcggacatctggtatctgcgtcagcacgagaaggtgctgaatctgccgtttaaggagggcatccgccgtcctgaccgcgacaacaccattgacgtgtacatcagtgaggagcatgacgacgtgctgcgcgacggtgtttggcagcagtttttcacggagaagccggaggtgttcacccgcgaggagaaagcggcttggcttgcgacgtttaagggcgtttccgtgggcagcgacgcgttcttcccgttcggcgacaacattgagcgcgcgcacaagagcggtgtagaatttattgcgcagccgggcggctctatccgcgatgacaacgtcatcgatacgtgcaacaagtatggcatcgccatggcattcacgggcatccgtctgttccaccattgatccgaaaggcgaggtgcttttattatgaatattctggttatcggcagcggcggacgtgagcatgcgatcatccgcaagctgaaagaaagccctaaaacggaaaagctgtggtgcgcaccgggcaacggcggcattgcggcagacgccgagtgcgtggccgttaacgcgatggacattgacggcgttgtggatttcgcgaagaaaaacgcagttgaccttgtgtttgttgcgccggatgacccgcttgcggccggtatggtagatgcgctcgaaaaagagggtatccgtgcattcggaccgcgcgcgaacgcggccatcatcgagagcagcaaggtgttctcaaaaaatctgatgaagaaatacggtatcccgacggcggattacgcggtgttctccgacccgaaagaggtcgtagagtacgtggaaaagcgcggcaagttcccggttgtcattaaggcagacggcttggcgcttggcaagggcgttatcatcgcgcaaaactttgacgaggcgaaggatgccgtgcacaccattatggaagacaaggtgttcggcgcttccggcaacaacgttgttgtggaggaattcctgaccggcccggaggtttccgtgctggcatttacggatggcaagacgctgcgcccgatggtgtcctctaaagaccacaagcgtgcactggacggcgacaagggcctgaacaccggcggcatgggtaccatcagcccgaacccgtattacacgaacgaaattgcggacgagtgtatgaaaaccatcttcctgccgaccgtcaaagcgatgcagacagagggcagaccgtttaagggctgtttgtacttcggcctgatgctgaccccggacggcccgaaggtcattgagtacaacgcgcgcttcggcgacccggagacgcaggtcgtgctgccgcgcctcaagaccgattttgtggacgtcatcaacgcggtcatcgacgagaagctcgacgagcttgagattgaatggattccggaagcgtgcgcgtgtgtcgtgatggcgagcggcggctacccgcagtcttacccgaagggactggaaatcaccggccttgacgaaaacggtcaggcggaaggcgtgacggtgtaccatgccggcacgaagcttgaaaacggtaagctgctgacgaacggcggccgcgtgcttggcgtgaccgcgacggctaaaacgctggacgaagcgctcgaaagggcgtatgcagctgtgaagaaaatccattttgacggcgcgcattaccgtcatgacatcggtagaacgaaataagataaaatgagaaaacagccctgtttcaacgtggacggggctgtttttgcgcagcaaaaaactccgcttgctcatcagcaaacggagttttcgtttatcgctttgaatttaccttattccagctcgaatgcgccggtgtagaggcggtagtaggtgcctttctgcgcgatgaggtcgcggtggctgccacgttcgatgatgtggccgtggtcgagcaccatgatgacgtcggagttctggaccgtcgataggcggtgcgcgatgacgaacacggtgcggcctttcatcaaggcgtccatgccggactgcacgatggcttccgtgcgggtatcgatggaggacgtcgcttcgtcgagaatcatgacgggcgggtctgcaacggcggcgcgggcgatggaaatgagctgacgctggccctgtgagaggccgctgccgtcgccggaaagaacggtgtcatagccctgcggcagcatacgaatgaagccgtcggcgtttgcgagctttgcggcggcgatgcactcttcgtccgtggcatcgagcttaccgtagcggatattctccataacggtgccggtgaacaggttgacgtcctgcaaaaccacgccgagggaacggcggagatccggcttcttgatcttcgtgatgttgatgccgtcgtagcggatctttccgtcagaaatgtcatagaagcggttgataaggtttgtgatggtcgttttgcctgcgcccgttgcgccgacgaacgcgaccttctggccgggctctgcgtaaagcgtgatgtcatgcaggacggtcttctccggggtataaccaaaatcgacatcctcaagctctacgtgaccggtgagctccgtataggtgaccgtgccgtccttatgcggatgcttccatgcccaaaggccggtgtgcttgtcggtttcggtgagcacgccgtttttcttttcggcgttgacgagcgtgacgtagccctcgtccttttcgctctcggcatcgagcagagagaagatgcgggaagcgcctgccatagccatgatgatggacgagatctgctgcgtgacctggctgatcggcataacgaagctgcgggagagctgcaggaacgacgcgatgccgccgagcgtcatgacgcccatgccggtgagggtcaggttcggtacgcctgcaagtgcgagaccgccgccaagcacggcgatgagcacgtaaaggaagtagccgagtgcgttcatgatggggccgaggatattggcaaacttattcgcttcggaagcgtttgtgaagaggtcgtcgtttcgtttgtcgaactcggcctttgttttatcttcgtggcagaagaccttgatgaccttctggccattgatcatttcttcgatgtagccgttcacattgccgagggattgctgctggcgaacaaaatagctgccgctttttgcggtgaccttgccgacgatcttaaacatgacaaagaggaacgcgatcaggaacagggtaagccaaatgctgagcgttaacatagaacagaacacggaaacgaccgtgaagatggaagaaagcgtctgcggaatgctctgggaaatcatctggcgcagggtgtccgtatcgtttgtgtagaagctcatgatgtcgccgtgggtgtgcgtatcaaagaacttgatgggcagcgtctgcatgtgctcgaacatctcgtcacgaattttctttaacgtgccctgtgaaacaactgccatggtgcggttgtagaacagcgtagagaacgcgccgatgatgtaaatgactgccatttggagcagcgcgtacagaagaccgctgaagttcggattggattcgagcaggagcggggagatgtaatcatcaatgagggactttaaaaatagggaggacatgacgcttgcgaaagcgctcaccgcaatacagatgaacacgaacacaaggtgcagcctgtacggtttcatataggaaagcaggcggaataaggtcttcttatcgagctgcttcatgctttctttcatggagagtctgggaccattaggacgcggtggcattgtcaggatctcctttcgtctgggattcataaacttcgcggtagatcgggcttgtttgcatgagctcgtcatgcgtgccgcagctgacgatcttgccgtcatctaagacaaggatcatatcggcttcctgtacggaggcgatgcgctgggcgatgatgatttttgtcgtgttcgggatctcctttgcgaacgcgccgcggataagcgcatccgtgcgggtatcgaccgcgctggtggagtcgtccagaatgagaatcttcggcttttttagcagcgcacgcgcgatgcagaggcgctgcttctggccgccggagacattcgtgccgccctgctcaatgtaggtatcgtagcctttagggaaggtttgaatgaagtcatcggcctgtgcgagctgacaggcatggcggatctcctcgtcggtggcattttcatcgccccagcgcaggttgtctttgatggtgccggagaacaggacgttcttttgcagcaccatggcgacgttgccgcggagggtatccaggtcgtatttgcggacgtcgatgccgccgaccttgaccgcgccgaggtcaacatcgtacaggcgcgggatgagctgtacgaagctcgatttggaggagccggtgccgccgatgacgccgaccgtggcgcctgccggaatgtgcaggttaatatcggaaagcacgggcttgccctctgtgccgtgacgatagctgaactggacatgctcgaaatcgatgctgccgtccggaacgctctttacggcattttcgggggtggtgatgtccggggtctcgttgagcagctcaacgacacgctcgccggaggtacgggacatggtgagcatgacgaagatcatagagaggcccatgaggctcatgagaatctgcgtggcgtaagacagcaggctcagaagctcgccggtggaaagaccggtcgctgcgtcaccgccgcaagcaacaatggtgcgtgcgccgaaccaggagagcaggagcaccgccgcgtacatgcaaagctgcatcaagggggcgttccatgcgagctgctgctcggcttttttgaagtccttatagatattttcggaaatgccggtgaacttcttattttcgtgatcttcacggacaaaggactttaccacgcggatgccgtgcaggttctcctgcacaacgctgttcagcttatcataagttctgaacacgcgctcgaagatcgggtgcgttctcgtcatgatgaagtacaggccgagaatgagcaccgggatgatggcaaggaagataagcgagagcttggcgtcgatgccgaatgccgcgacaagcgagaagatcgccataagcgggctgcgtaccgccatgcggatgatcatttggtaagtgttttgcagattcgtgacgtctgttgtcagacgcgtgacgatacttgcggtggaaaacttatcgatgtttgaaaatgaataattctgcaccttatagaacatatcgtggcgcaggttgcgggcaaagccactggaggcaatggctgcgaatttaccggaaatggcaccgcagaaaagctgacccagtgcggagagcaacaggacaatgcccattttgacaatgtaccccatatcgcccatgtcaatgccgtaatcgatgaggttcgccatcaaaagcgggatgatgacctcgaagacgacctcaccgctgatggtgaccatggccaatatggaattctttttctgttcgcggatgctttccatcagttttttaaccatctgcaccgctcctttctttcttttgctgcttttcggcaaaggcagcatctacatttatttttgcgcgccgtaaataagtgagcatggtttctttttcattttgcgtgaagccctttgttaaaacggcttccattgcttcgtggtcggcgcggatatctgccaaaaggttttctgacttttccgttagggtcagacgacgcaggcgggcgtccgtttcgccggtgtggcgctccacaaaaccgtttcgcacaagcatatccaccactttggaggcggtggaacgcgtaatgccgaagcggcgctcaatatcgcgcaaatacacgggcccgtctttgtgatcggcgatgaactggatgacccatgtgtttgtgccggtgaggttttcgtgttcctttttatgggaatacgtatcaatataccggcgcatggtggtatccagcacatgcaatgcatggccgatgggctctttttcgtgatcgtgcattgttaccatcctttcatctgttttcgcagggagaaggccccgccgtacagcagaatcgaatctgctcctatgtaaacaatcatgcgcttaattgtttactctggcatatattataatcacttgaaagtttgttgtcaacaggaaattaaaaatcttttttgcgaggtgttttcatcttaggcggaatgtgctaaaataaaacacagtgaaccgatgtgccgcaaattcggacggcgaatgaatcaatgaaaggaaagccccgagggtgtgggcggtgtatgatatatgaataagaaagtgaaattggcgtttgttttggcaggaatcggcatctttgcggcggctgcgctgcgctgcgtgcagatgctctgcttttttgattatgacacgggctttgtgacggacagcggactgttgacgtatatttactgcggtgcggcgatcggcgtatcgcttctctgcatgcttttgtgccgtgtggacaaaaagctttgcgcgcgcatagagacgaaacgaaatgcggcggcgggtgcttctgcgcttctgatgtgtgtatttttgtttttgtgtgcggcagcgcttctgcgggacttttacttataccgtaacaatcagccgacctactttgtgcaggcttcgcacgtgacgacacatttgccgtttgcggtcttaacgttgcttttcgcgatcgtttctctcattttttccattatatggctgacgggcgagggcttcccgagcggcacgggcgggctctgggccatcggttccgtttggggcatttcgtatatgatcgtgacgttcatgacgtattccgctgtggcgacgacggaggagaatatctttaccgtgggtggcggtgcgatgatgctgctgttcctgctttccgaaggcaagctgctctccggcgcgggcggtaaaaaggcgctgcgcagcacgtatgtgttcggcctgccggcggcagtgctttggatgacgtatgtgatctcgaacacggtgctcatcattgcggggcgcgggtatgcgacggagatgccgtatgtgatccagcttgcgatgctgtgcctttctgttcacagcctttgcctgctgcttacggtgagcgggcagcgcgtttctgcgaaagcggagagcaatttagaagaaaatgctttaaaagacacgggaaacgcgtgaattttctgaaaattacggaaaaagtttgcatttttagcagttagcccttgtaaaatcctgcgaaatgctataaaatagaattgcaaattatgcatccacaattatcaggaggtatacaatcatggcagttaaagttgcaatcaatggtttcggccgtatcggccgtctggcgttcagacagatgttcggcgctgagggttatgaggtcgttgcgatcaacgatctgacgaagccctccatgctggctcacctgctcaagtatgacaccgcacagggcggttactgcggcaagatcggcgaagctctccacacggtttccgctgacgacgaggctaacaccatcacagttgacggcaagaccctgaagatctacgctgagaaggacgctaaggaccttccgtggggcgagatcggtgttgacgttgttctcgagtgcaccggcttctacacctctaaggctaagagccaggctcacatcgacgcaggcgcaaagaaggtcgttatttccgctccggcaggcaacgatctcccgacaatcgtttacagcgtaaacgagaagaccctgacggctgatgacaccatcatctccgctgcttcctgcaccacgaactgcctcgctccgatggcgaaggcactgaacgattatgctccgatccagagcggcatcatgagcacgatccacgcttacaccggcgatcagatgatcctcgacggcccgcacagaaagggtgacctccgccgtgcacgtgccggcgctgcgaacatcgttccgaactccacgggcgctgcaaaggctatcggccttgttatcccggagctgaacggtaagctcatcggttccgcacagcgtgttccggttccgaccggttccaccaccatcctcaccgctgttgttaagggcgctgacgtaaccgtcgacggcatcaacgcagctatgaaggcagcttcctctgagagcttcggctacaactgcgatccgatcgtttcttccgatgttatcggcatgagattcggttccctgttcgatgctacccagacgatggtctccaagattgctgacgacctctatgaggttcaggttgtttcttggtacgacaacgagaactcctacaccagccagatggtcagaaccatcaagtacttcgctgagatctaatttcggcttaggcgctggaaaaatcaggtgttttgacgctgcatcatgcagcaaaagactgaattgattttcgcaccctttcttccgtggttcatggaggaaagggtgttttttatccgaaatacgtacacacggcaaagaaaggcagggaaaatatgagagaactgcacacagaaagacttttactgcgcacgccgcgggagagagatgcggcggagatcatggccatacgcaacagcgctttcgtaatgaaaaacaacgtaatgaaagtgcttgataaagagcagatggttcatttgattcatagggaaatcgattatgaagacacatggtatattgagcgaaaagaggacggcgctttgcttggtatgattgcggcggaggaggacggcgttcggttcgatgtgcgctcgagatgtctttcgtattatctcggggagcaatatacgcggcagggctatatgaaagaagcactgcgggctgtgctgcatgaactattcaccgaagaagatctgaaagttgtagcagcgcgtgttttcacggggaatattgcttcggaaaagttgctgagatccttggggtttgtgtatgaagggtgtatccgccgctgcgtgcgtacgtcagaaagcgaaatccgcgatgacatgcagttttcgctactgcgggaggaatatttcgaggcggaaaaataattttacaaaaaagcttgacttagagtatactttaagttgtaagatataggaagcaaaatgcttggaattttttacataaggagtatgagtaaaatgtctggaaagaaattaggcttcggcctcatgcgtctgccgtctctggacccgaacgacccgggcaagatcgacattgagcaggtcaagaaaatggtggatacgttcatcgagcgcggcttcacgtattttgacacggcgtggatgtactgcgcattcaagagcgaaaacgccgtgaaggaagcacttgtttcccgccatccgcgcgacagcttcacgctgacgacaaagctgcattcgtcattcgtgaattcgtttgaagatcgcgaccgcatttttaatgagcagatggaaaagacgggcgtaacatattttgattactacctcatccacgacatcaactgccatagcattgagacgtacaataagttcgattgcttcggctggatccgcgacaagaaagaaaagggccttgtaaagcacatcggcttctcgttccacgacggcccggagctgttggacgaagtgctgaccgcgcaccccgagtttgagtttgtgcagttacagctcaactacctcgactgggaaagcgccggtgtgcagtccagaaaatgctatgaagttgccgaaaagcacggcgtgccggtattcgtcatggagccggtgaagggcggcacgctcgcaaacgtgccggaagaagtgacgaagctgtttaaggactataattcagaagcttccgtaccgtcttgggcaattcgtttcgcagcgagcctgccgaacgtgaagatcgtgctttccggcatgagcgatatggaccagcttttggacaacacatcgtacatgcaggatcttaagccgctgaacgatgaggaaaaagcgctcatcaaaaaggcgacggacatcatcaacgcgagcatcgatattccgtgtacgggctgttcgtactgcacggacggctgcccgatgcagattgcaatcccgaagtatttctcgctgtacaacgccgatatgcaggagctgcgcggcagaggaatcactccggacgagggctggacgccgcagggcgagtattacgagaacgtcgcaaagcacttcggcaaagcgagcgcgtgcattcagtgcggccagtgcgagggtgtatgtccgcagcatttgccgatcatcgagtacttgcagacagtcgcaaagcattttgagagagagtaaacacaaggctttctataacgatagttaaaagtttttgatccaacttttttcaaaaagttggtgaggtctcggggcaaagtcctgaggcgcgctccgcagagcgcgaaatacttttgactgccgaaaaatcaggacgggaacctcaacagtccagtggactgttgaggtgtgggagacccaattaaggggtctcccgaaagagcggctatttagccgctctttttatatacgcaggcatgaaaaaaccgcacgctcgatgtgagaaaacgagggtgcggctgtttttcgaaagacttgcgaggcaagtctttcaagaaaccccttgatagggtttcttgcggctaaacagtccactggactgtttagcctatcttcctgatctttgtgtaggcaaaagtgtttcgagctctgcggagctcgaccaagggcgctgcccttggattccgcgacctttttgaaaaaaggtcgatcaaaaactttattcggcggctcgtagcattacaatggcagatatggcagtatgagttcacacacaagcacggtggcgctggcgataatggcgacggtgagcaggcttttaccgcggaatgctaaaatcaaagcggcggcaaagccaagcgcggcgctgatggcgctgccggtggcggtgagaattgccgggaaggtcatggcggaaagcgtggcgtacggtacataatagagaaacgagcgcagtgtgcggttcgtgatcttgcggcggatgagcgtcagcggcagcatacggataagatacgtaacggccgccatgacgagtatgtaaaggaaaacctcaactctcatgcggcatctccttttccggctctgcgggctcatccgggatggggaacagcagcgctgcaccgcctgcggtgataagcgtgatgacaatgatgcggaagcccgaggaaatgttgcacagcaccggcagatacgtgaacagcgcggaaagcaccatggaaaggacgaccacaccggcaacgacgcggttctcttttgcaggcggcaggatgatggcaatgaacataccgtagatcgcgatgccgagcgcgttcgtcaaaacggccggcagaatgttgcccgccgccgcgccgagtgccgtgccgagcacccagcccggaatggcaacggcgatgagcccatagctgtaaaacggtgagagaggctccctttggctgacgctgacggcgaagatctcatccgtcatgccgtaggcgatgccgaggcggtgcccaaggggcaggctcggcgagagcttttgcgagagcgcacacgacatgagaaaataccgcaggttgatgatgagctgcgtgaatgcgagctcgatgagcgacgcgcccgatgcgatgatggcgagtgctgcgaattgcccggcggaggtgacgtttagggcggagagcacggaggcttcaaacaccgaaagtccgatgcctgcggcctgaatgccaaacgcgaacgaaacggcaaagtacccgaagcaaatgggcatgccatctttgagtccgcttaaaaaatactgttttctggtcatgatgaccttctccttctttgctaccgcacccaaatgcggcaaaatttgcaaaatacaaccgtttccaaaagaaaagcacagaaaaaggtgtgtaaagtatgaaaaaaggcggttttcaccgccttgaaatgggcataaaaaaccccgcccgaccgtaacgtgctctcaataacctgctacgtaataagcaggtgggtgccctcccgcaggtttcgcgctcccttcttccggtatccggtcaagccgggccgggaggtctgcagtccgcctgcggagccgagctccctaaaagttgagtgtagggttattttgcacggtccgcgcatcgggcaggtgtctttacatgatcttgaacggggaaagaagattactcctcttcttcctccatagcctgtgcatagcgggtctcgaaaatttcggcgagcttatccagcaggtcgtcgtcttcgatctcgcaaagctgctcttcgccgttctcgtcttctacgacttcaaagatgtagtactcatctgcgtctgcaacttcgctttgggcgtcgcgcagagtggggacaagtgccataaagtagccgtcatcgttctcgagctcgtcgatgatctcaaattcgtgctccgtgccttcatcgtcgatgagggtgatgagctctgcttcgtattcctggttgttgtctatactcataggaaaagccttctttctcagtatattcgccgttctgtgatttatgcggcggagcagaaaagctgtggaaaacaagcccgttgcttttgcctgcaagaataattgtatcgtgaatgcggaagaatgtcaagcttcattttgcgaaaacagaatatacaaataaaaaataaaatcttcaaaaaaactgttgacaaagtagacagatggtgctaatatataggtgaaaagagaaagaactccagaacgcaaagtagatcgggaaaaccgtaagaggttttcttggtggaggctcaaaaaagtctcggtaaaagatcgaagcggttcagcgcgcggaaagtattccgaaggggagagaaaggcgcggaggaaactcttgaggcagtgtttgcaaaggcggagcttcaaatgttcttcggcttccggaaaatgtgatgaaagagataagtaggcttttaagaatgtgccggtacaaagggacaaaaagccgaagcggagaaacgggaacataaataaagaagcaaccgtacgttttgaacatgtggaaacaggcaaaacgtgaaaagaggcaaagctgcatgagccgcaaaggcaaatctattgaaagaaagcgggtgaggccaatggctactgaacctcagcagcagaagatccgtggtgcgttgcgcctcggatccctgaagtagactgaatatttgcacacgagtgtttcaagctttatgaaagcgcgggatcgcaaaagcgagtcccaaaaggttttcgtggtacagcaaagataagtaggtcgaaattaacatatagaattatacatgggctgtacaaagtgtacggacgtgtgtaaggacaggcggaaaacgccaaagaaaaaatcaaatacagtttttgagaatatacatggagttgtgtccaatgcacaaatgataaactctgaaagaccgacgacattctgaaagtaatgcagagtgcaggtataaaaagagaccgatggtttcaagcagaggaaagtccgatgtattagtatcagtttaaattaacttgagatgtgtgcgctgagcgtacaccgcacaagatgtgcaataaaaattaaagaacgagaggctttttcgggatgctgaaagagcctcttttgttttgtgcgatagggggtatgtcgtgcaaggagcgcggtttgcgtgttttttggtttaagtaggagaacgggaacatgtatttgattctgataaagttttcgactgcgtgtcgctttgcggtagaaaactctttcgcgccgcacggaattgtatttttcgggagaatgtgctatactaacgatgttcgcaagacggtgtgcagaaaagctgcacttcatcaggaaaaggagcggtgacttatgagcgaaaacatggaaaaggtctatgacgtaatcgtggtgggttccggccctgcggggcttacggcggcactgtattgcgcccgcgcgggctacgagacgctggtgctggaaaaatatatccccggcggtcaaatggtgacctcgaatgaaattgaaaattaccccggcttcccggaggcggtggacgggtttacgctgacgatgaacatgaaaaagcaggcggagcgctttggcgcgaagcagacctacggcaacgtgacggcactgcggttagacgatgatgtgaaaattctggagacggaagacggcacggtttaccgcgcgaaaagcgtcgttttggcacccggtgcggcaccgaggacgctcggcttgccgaacgaagacgctttgcgcggcaagggcgtttcctactgcgcgacatgcgacggtgcgttttataaagataagacggttgcggtcattggcggtggtgacacggcggcgggcgatgcggcttttctctccgcgatgtgcaaaaaggtatatctcatccacagaagagaccgcctgcgcgcttcaaagagctatgagaagaagctcgataagccaaatatcgagatcgttttcgatacggtgacggatgagatcctcgaaaaagacggaaaagtcggcgggctgcgtctgcgcaatgtaaagacggacgaggtgtgcgagattgaggtgaacggcgtgtttgtggcggtgggcaatgtgccggcgacggactttgtacgcgatattcttgaccttgacgaaagcgggtattttatggcgggcgagagcacgaagacgaacgttccgggtgtgtttgctgcgggcgactgtcgtaaaaagacgctgcggcaaatcgtgacggcggctgcggacggcgcggtggcggcgcacggcgtggaagaatatttatcataagaaagaagagggcgctttgcccgaaacataaaggataggaaatatgggaaaaatcaaagaactgcttataaaatacaaagagctggttttgtacgtggtgttcggcgtgcttacgacggtcgtgagctatgtttcttactggatctttacggattttctgcacatcccgtacatggtatcaacagcgctttcgtgggtactttcagttacctttgcgtatgtgacgaaccgcaagtgggtgtttgagagccgtgcgcacggctttgtgccgattttgacggaggcggcgaaattttttgcgagccgtattgtgtccggctttatggaaatgggcatgatgttcatcggtgtggatctgctgcatgtgaatgataagattgtgaagctcgtcgcgaacatttttgtgatccttgcaaattatattttaagcaaactggtcgtttttcgtaagaaaaagtaaattgacgaaacgaggttatgggaatataattgataagataaagacatccggcctttggccgagacggaggcttttatggcgaaaagaaaacaacgccgcgatgagtttcaggatatttccagttactcctcaaagcaggcgtataagaaaaatcaaaaaaagaaaaaacggacgggccttaaggtctttttgagcttcatctgcgttattttggtgctggtgggcggcgtgatgatctacgcttccacggtgcttttgggcgacctgaagacgacgaccatcacgaaagacaagacggagctcggtatttccgaagaaacaaaatcggaagcgggcattacgaatattgcgctgttcggtgtggatgcccgcgattatgacggcggtacctttgccgggcgcagcgacgccattatggtgatgtcgatcgataacgtgcaccataaggttaagctgacgtccatcatgcgtgatgtgcgcgtgtatatgggcgacggcagcccgtatgactccggctatgataagctgaaccatgcctatatgtacggtggcccggagcaggccatccgcacgattaaccagaacttcggcctcgatattcaggactacgtgaccgtgaattttgcctccatggcgaagattgtggatgcgttcggcggtgtgaatattgatttgacggaagatgaaatcagtgagatcaacaaaaatatgtatgcgctggcggcggaatcccctgaatcaatggcaggcgatgtttctacatacgcgccgctttcggcgggcgagggcgtgctcttgaacggcgacgaagctgtggcttacgggcgtattcgtgccatcgacaacgataacggccgtgtggaacgccagcaggaggtgctttctgcgctcttgagcaaggcaagttctatttctaagcttgaatacccgagcatcattcaacagcttgcgccgctttgcgagacttctttgacgtttgataagatgatcggtctggcacagattgcgctgacgggctttgacattgagcgcctttccatcccgagtgatgtggagggctatgcctccgattactgcgagggcggcggttggatgtggacgtatgacaccgatgttgcggcacaacatatccacgaatttatttacgaggatgaaaactgacccctgacggtcgcgtggccgaacctgtacatatggcggtgtgatgccgcagacgagaaaggacaatttagctatgaaaaaaccgattttagtcgttatggcggccggtatgggcagccgttacggcggcctgaagcagatcgatcccgttggcaaaaacggcgagattatcatggatttttctgtttttgatgccgtgcaggcgggcttttccaaggtaatcttcatcatcaaggagcagctttttgaggactttaaagaggtcatcggtgaccgcgtatcgaagtacgtgcaggtcgagtatgttttccagaagttggatgacctgccggagggctttacggtgccggaaggccgcgagaagccgtggggcacgggccacgccgttttggcggcacgcgaccacattgatgcgccgtttgtcgtcatcaacgcagacgatttctatggcggcgaggcgtttaagaaaatcggcgcgttcctccggaacgtgaaggaagacggtgaaaaggcacattgggcgatggtgggctatcatctgaaaaacacgctgaccgaaaacggccatgtggcacgcggcgtatgcgtggagaaagacggcgtgttggataccatcgtggagcgcacgcacattgaaaagcgcgaggacggcccggcttacaccgaggatgacggcgcaacgtggcacgcgctcgatgaggacacgaccgtttccatgaacctgtggggctttacgccggactttgtagacgcattgaagaaggatttcgtctcgttcctcgagaacgatgtgccgaagaacccgctgaaagcggaatacttcctgccgtttgtcgtcaacgaccagattcgcgacggcaaggcagacgtgacggttttaaaatcggcggacaagtggttcggcgtgacgtataaggccgataagcccgtcgtgatggcggcgcttgccgagatgatgcaaaacggcacatatcccgacccgctttggaagtaatttcaaaccgaaataagatacaaaaggggcgctgcggcgctcctttttgcgtatattgtgcgcttttttcgcgaaatgtgtgttttgccccttgcgaaacgcatgaaaaaaagctataatgaagaaaatcagtaaaatggctttttgcgggatgcgggcggcgctttttcgctgcggctctcttctgcgcgaagtctgccaaataaaactggaaccgaaaggagtaccacttatgaattattccaaagaagtggaagagatgtgtattgtagccaagggcccgaagcacggtccggctcccatcccggaagagggcaagtgggtacaggcaaaggaagttaaggacatttccggttacacccacggtgtaggctggtgtgcaccgcagcagggcgcttgcaagctctccctgaacgttaaggacggcatcattgaggaagctctcgttgagaccgtcggctgctccggcatgacgcactccgctgcaatggcagcagagatcctcccgggcaagaccgttatggaagctctgaacacggaccttgtatgtgatgcaattaacaccgctatgcgcgagctgttcctccagatcgtttatggtcgttcccagtctgctttctccgaggacggtcttgttatcggcgcaggcatggaagaccttggtaagggcgcacgctccatggtcggtaccatgtacggcacaaaggcaaagggcgttcgttatcttgagatgaccgaaggctactgcaccagaatggcactcgacgctgacgaccaggttatcggctacgagttcgtttccctcggcaagatgaccgacttcatcaaggccggcatggagccgaacgaggcgtacaagaagtctatgggtacatacggcagattcaatgaggccgttaagtacatcgacccgcgcaaggaataaggagggcacgagaaatggctacatttgaaggttatgagagacgtgaggcgaaaatcctctccgtcctgaaagaatacggcatcaattccattgatgagtgcaagaccatctgcgaagagaagggcatcgacccgtacaccatcgtacaggaaacacagccgatctgctttgagaacgcaaagtgggcttacaccgtaggctgcgcgattgctatcaagatgggctgcacgaaggctgctgacgctgctgccgctatcggcatcggcctgcaggcattctgcatcccgggctctgttgctgaaaaccgtaaggtcggcctcggccacggcaatctgggcaagatgctcctttccgaggagaccgagtgcttcgcattcctcgctggccacgagtccttcgcggctgctgagggtgctatcaagatcgctctgaacgcaaacaaggtcagaacgaagccgctgcgcgttatcctcaacggtctcggcaaggacgctgcgttcatcatctccagaatcaacggctttacgtatgttgagaccgagttcgatccgtacacagaagaagttaaggttgtcagcgaaaaggcttattccaacggcccgcgtgcggacgttaagtgctacggcgcagataacgttccggaaggcgttgcaatcatgaagctcgagaacgtcggcgtttccatcaccggtaactccacgaacccgaccagattccagcacccggttgcaggtacctacaagaagtggtgcaatgagaacggcgtgaagtacttctccgttgcttccggcggcggcacaggccgtacgctgcatccggataacatggctgccggtccttcctcttacggcatgaccgataccatgggccgtatgcactccgatgcacagttcgcaggttcctcctctgttccggcacacgttgagatgatgggtctcatcggcatgggcaacaacccgatggtcggtgcaaccgttgcttgcgctgttgctgttgaagaggcttccaagtaagagttgcttctgaaaatcgcatattaaagcataaaaagtgctcccggtcgcgtgaccgggagcacttttgcgtaaaataggatcccgggatatattgactgttcttatggcttggtatacccggggtttgctttataagatctggtcgtcatcgctggggatgtagaggaggatgtcttccactttgcagcttaagatgcggcagaggtcgttgattgtggtggtgttgagcggcttattatgacgcagcttatcgatggtggagctggagatgtgatgatttttgatgagcgtataggtgaattctcccgagctgcgcagcgtgttccaaaagggcgtgtacacgaccatagcttcccctcgctttccctgcataaaatatctatgtacctttatcttatgcaatcgttctgttcttgactatggtcgttaaatagactataatgtaaaaatgcaaggtaaagcgcttgataggcggggagagtaattatgattttgaacgcaaaggagatattaaagcagctttataactgctgtgatctcattgaagaaaggctgctcgacggcgacgaaaagccggggtgtgacctgcgaaaacagcttttaaaggacacggcttcgtttgcggcgcgtgtttcggcgcgcaagacgatcacagaggcggaagcgtcgtttttaaacgcactgacgggcagaaaagacacggcggaagtgtggcgacctgtctgctgtgagagggaaagcggcgtgctggagtccttttggtattttgtgcaggcggataaggccattatgcgccgacacgcaatgagccgcgaggcttcgatgaccgagagcttataccgctatttctgtgctgtgggagacgcgatggtcgcggaaaacttgtgcacgaaagacgctgtgcgggcggagacggagcggctttccgcttgcctgaaaacagcgtttgacaacgaccccgaactttgctaaactgaatttatccatttggtgaagcgaggggcgcttatgaacacatttgaaaagctcgaaaggttgacggagcttgcaaaaaaggacgagactttgcgcaaagctctgcttaaaacgcgcgaaaacaaggagccgattctctcattttgcgcgctggcgcgggaagcgggcgtggagctttaccccggcgagcttttggctgtgggcgaggaatactccgacaaccagtgcaagagcacaaacggcggcaaccctacgccgtatgactcttttaacgatgcctatgagattttcttggcgtctgttgggatatgaagaaaaggtttgagaactgaaaaaataagccgtgctgttaccccccctattagggcgacagcacggctttctgtatctgccgatctgtgaaaaagtcaggttatggtcatcatgcgtttatgtggtgacagactttgcgtgcgccatacggtacttcgcgatgaagtagttcacgagcgcggttaggcccgccgaaacggtgcacacggcgcatgtgatgaggaacacgagcagaaggcccgttacgatgacccacagcacattgccgacatcgggtgtcgtgttattcaggctgaacgcggagatgagctgcgccgcgagcaggatgagaaatgcgccgatgaagctgaactgcatggtgccgcggcagaggaaccagcgcggaatggcgagcacgaaaaacgcaaagatgaacgcgacgagcacgccccacagcgtatactgtgcatcgggcgtgagcgcgccgttttcagccgggtgcgcgaaggtgccgagggcgacctgcacgtgtgcggcaaaggtcaagagcagaatgatcgtgccgaccacaccgccaaagatcatgacgccgctccaaaagccgtccacgggggcaaaaatacgctcctttaagtgcggcttgccgtcttttttgtcgattttgtacgtgccgtagaatgcttcggaaaatgtcatagggacactcctttcaaaaaacatcagtcttcgtgtgtttcttcttctggggttctccgggggtcatttttcacgatcagcaggcgggaaagacgctggtcttcaatttcaagtacggtaatggtgagcccgcagacctgtacgctggggtgctcgttttcttttggaatgcggcctaaaaggtcggtgacaaggccggcgatggtatcgtaatcgccctccggcagctcagtgtcggtaaggtcggaaatctcgtcgatggaggtggtgccgtccacggtgaactcgttttcgctgacacggaagatctcttcctgttcgttgtcgtattcgtcctgaatgttgccgaaaatggactccatgaggtcttcgagtgtgacgagacccgccgtgccgccgtattcatcgacgatgatggcgatctgcaggcggcgctccttgagctctttaaagagttggctgcactttttcgtttccggaatgaaatacgctgggcgaaccatgtcttttaaatggatgaaatccggtacgggctggttgacgtagggcagaaaatccttaacatagcagatgccgacgatggtatcgatgtcttcgcggtagacagggagacgggagaagccgttttccaccgcaagtacggcggcttgtgcaatggtgctctcctcatcgatggcgcagatgtccgtacggtgtgtcatgatctcggtgacggtggtgtcgttgaaatcgaaaatgttcgtgatcatgtcgcgctcattttcttcgataacgcctttttcctcgccttcgccgaccatgtggaggatttcttcttcggtgacggtttcatcaagcgctttggggtcgttgcccaaaagacgcatgagaccgtccgaaatgaggttgcacaagaggacaaacggatgcatgacggcgctgagggcgcacagcatggggcagagtttgtatgtatgctgcatgccgtgtgcagccttgtgcgctacgaattttttcggagcgaggtctgctgccgttagataaagacctgcgcacagcaatgtgcaaagcagtgccgaaagcacggcagcggcagccgtagggagcgcggcgcggatgaatacgttgtaaaggcgcggcgcaaagccggtgaccgcaacggcgagagcaaagaagcccataagcatcatgcccgattgcaggggcgaaatgatgcctgcgctgcgttcgagatactcgagcagctttttggcgtgcggttcaccggactccgcatcttttttgatgcgggattcgttagccgtttccgcggcggattcgcacatggcgaaaagcgcgccaagcacgaaaaagagcagaaacagcaacagggcgagggggaggggtaagacggacgaggacggcagtaaattgccgtaagggtcgtcgttcatagtgaaaaaagcatcctttctgaaagtttgggagcagtgaaatggttttgaatgtgctttcgtgaaggcgggagaataaagtttgcaagttcttagggaagcgccctaagtcgctttccgcaaaagccaaagaaaaacgcaatatgaaaaagcgagttttcttttcaaaagcgtcacgtgatgtttagctaaaactaactgctcaccgatatataattattaaaattttaccgcaaaaaaacgctgttgtcaatattttatgccggaggcgcgccgaatcccggacaaagcggagggagaacgacgaaaagggcgaaaggcgaagcggagaaaaataaaaaatgccgaaaatctctgttaattcagaagaaatttcaaaaaatcctcgttttttcctttacatataggcgaaaaaatgataaaatttattttgaacgacgacaggtgcttacgggagagttctgcaaacggcagggcggtgaacggggtactgcgccgtcaggtaaatccattgataatccttaaaggaggaattagttaaatggcaagaaaaatgaagaccatggatggcaacaacgccgccgcgcatgtttcttatgcgtttaccgacgttgctgcgatctatccgatcacgccgtcttctgttatggctgatgagaccgataagtatgctgccgccggcagaaagaatcttttcggccgtgaagtacgcgtaacggagatgcagtctgaggccggcgctgctggtgcagttcacggttctctggcggctggtgctcttaccaccacctacaccgcttctcagggcctgctcctgatgatcccgaacatgtacaagatggccggcgaactgctgccgagcgttatccacgtttccgctcgctgcgttgctacccacgctctgaacatcttcggtgaccattccgacgtctatgcgtgccgccagaccggttatgcaatgctgtgctccaacagcccgcaggaagttatggacctcggcgctgtggctcacctttccgctatccacggcaaggttccgttcctgcacttcttcgacggcttccgtacctctcatgagattcagaagatcgaagtatgggactacaaggatctcggcgagatgctcgactgggatgccgtaaacgagttcagaagacacgctctgaatcctgagcacccggttctccgcggccaggcacagaacggcgatatcttcttccaggctcgtgaggcctgcaacaagtactacgatgcgattccggagaccgttgtcgattacatgaacaaggtcaacgagaagatcggcaccgattacaagcccttcaactactatggcgctccggatgcggagaaggtcatcatcgctatgggctctgtctgtgagaccatcgaagaagtgatcgattacctcgtagcagccggcgagaaggttggccttgttaaggttcacctttacagaccgttcgttgcaaagtacctgcttgacgtgcttccggaaaccgttaagacgatctccgtgctcgacagaacgaaggagccgggctccatcggcgagccgctgtaccttgacgttctggctgctatcaacggcacgcagttcggctgtgctaaggttctcaccggtcgttatggcctcggctccaaggatacgaagccggctgacatcatcgctgtttaccgcaacatggaaaagggcgacgatgcgaagaagaaattcaccatcggcatcgtggacgatgttacgcacctgtccctcgaagcaaacgagcacccggataccgcaccggcaggcacgaagtcctgtaagttctggggcctcggttctgacggtaccgtcggcgcaaacaagaactccatcaagatcatcggcgaccacaccgatatgtacgcacagggttactttgactacgactccaagaagtccggcggtctgacaatgtcccacctgcgtttcggtcatacgccgattaagtccacctattacatctcccaggctgactttgttgcatgtcacaacccggcttaccttggcacctatgacatggtcgaagacctgaagaagggcggcagcttcctgctgaactgccagtggacgccggaagagcttgacgagaagctcccgggcaaggttaagaaatacattgctgataacgatatcaacttctacacgatcgacggcttcaagatcggtaaggagatcggccttggcaccagaatcaatacggttctccagtccgcattcttctccatcgcgaagatcatcccggaggaagacgcaatccgctacatgaaggatgcggctacgaagtcctactccaagaagggtgacgccatcgttaagatgaaccatgatgctattgaacgcggcgctaacggctacgtgaagattgatgttccggcttcctggaaggacgctgtggacgattccacgaagcacgttgcgaccggcgaccgtccggagctcgtggactatgtaaacaacgtggttatcccggttaacaccttccacggtaaggatctgccggtttccacctttgaaaagtatgcagacggcacctccccgcagggcaccgctgcttacgagaagcgcggcgttgcagttgacgttccgacctggatcccggaaaactgcatccagtgcaacttctgctctatggtctgcccgcacgcggttatccgtccggtgccgatgacagatgcagagctcgcggcggctccggctgctgtgaagagcaaggccatgaccggtatgccgggcatgaactttgtcatgacgatttccaccctggactgcacgggctgcggctcttgcgtacaggtttgcccgggcatgaagggcaacaaggctctcgcaatgtccccgatcgacaacgagcgcccgggtcaggaagtattcgattacggcgttaagctggatccgaagccggaagttcttgctaagttcaaggacaccacggtcaagggcagccagttcaagcagccgctcctcgagttctccggcgcatgcggcggctgcggtgaaactccgtacgctaagctcgttacccagctgttcggcgacaagatgtacattgcaaatgctaccggctgctcctccatctggggcggttccgcaccggcaacgccgtacaccgtcaacaagcagggtcacggcccggcatggcagaactccctgtttgaagacaacgctgagttcggccttggcatgacgcttgcacagaacgcaattcgcggccgtctggagcagctcacgaatgagctcgttgcagaagaaggcgcaagcgaagagctgaaggcagcagctgagaagtgggttgagaccatggctgaccgcgctgaaaacggtccggcggctgaggcttacatcacggctcttgaggcttcctcctccgagaaggcagccgagattctgaaggataaggattatctcgctaagaagtccatgtggatcttcggcggcgacggctgggcatacgacatcggcttcggtggcgttgaccatgctctggcttccggtgaagatatcaacattctggtcttcgataccgaggtttactccaacacaggcggacaggcttccaagtctactccggtcggttctgttgcacagttcgcggctgcaggtaagtctgtgaagaagaaggatctggcttccatcatgatgagctacggctatgtttatgttgcgcaggtcgctatgggcgccgacatgaaccagtgcctgaaggctatgcatgaggctgagagctatcatggcccgtccatcgttatcgcttacgcaccgtgcatcaaccacggtatcaagggcggcatgggcgtttccatgaacgaagagaagaaggcagttgcagcaggctactggcataccttccgcttcgacccgcgccgtgctgacaacggtgagaacccgttccagctcgacagcaagaagccgtctgcttcttaccgtgacttcatcatgggcgaggttcgttacaacagccttacccgtgcattcccgcagagagccgagcagctcttcgagaaggctgagaagtacgcagaagagaagtacgagaagttcgcacacatggcttctgaggaggaataattccgcaaggaatttttcgcctgtactgaaccgtacaaaagcggcgtaaaccgctgaaataaagagacccccgatttgcagcaatgcagatcgggggtcttgctatattataaaacctttaatagagtatagcaatgaagtaaaattggaaaatagtataaattatactcgacaaatgtttgaaaaattgatataatatgaatgaaatatctgcggtgcggaggcagtggattttctcgattacctccttattgtaagcggctctttatatcgataaaacggtacagttggctccgagtttgtggcgcaagatattgtagcctaaacttatgctgaagctcctgtataccgactgccacatgatgcttttacagtttcccatcgtgaatgatgtaattccggcataaatacaggctgattctttatgttttcactaataaaatttatcaaaatcttaattttgtaggaataaaaggaaaaattgtttgttttcaatattcttcagacatgatattctataatcacttccataaaggaaaaaccattattttaaggaggagtaaaagtggctgtgcgttacaatcccaatcctgcaagaattacggagccgttgtataaagttgaggaactggaaaaatctcctttgtacactgtgctttgcggcggaaaggagttgacggtttaccacacggatagttttgattacgtaattccggttgtggacgacgattctccgctaagttttcaggtaaaagtatccaaagattttcaaaaggcggttttccgtccggccaagaccaatgttcaggctcagatttccggccgagagttgagcttccagctggaaaagcccagtaaggtcaccttggagttagatggcaatttgaagacaccgctctttatcttgtgcacaaagcgtgtcccgaagcccgaaaaagtggattatctttttgagagtgggaaagtctacaatgttggcacgttagaggtcaaagcggaagaaacggttttcttggaagagggcagtgttgtctgtggttgtgtgaatgctcttttcgcccacggcatgagaattttaggaaacggcattctgaatggttgtgtatggcatccgaaagaagaaaacggtggcggcagaccaatgattcggatggtgttttgcgatgatgtgaagattcaaggcatcaccatggtggacggtggttcgtggcacctggttcctggcgcttgccggaacgtggagattgaggatgtaaacatcatgtctcgagtttgcacgggtgacggcatcgatattgtaggctgcgaagacgtaaccatgcgaaactcctttattcgcgcttcggatgactgcgtgtgcatcaaagctgcaagttatcccgaccctgctgccaatagggatgtgaagaatattctggtagaacactgcgttttgtggaatgcagaacccggtaacgccgtggaaatcggatatgaagtgcgctgcgatgagattagcgacatcacattccgagatctggacatcgttcattgcgagtatgagggtaatcagtctggcggcgtgctgaccatccacaatgcagatcgcgctcacattcatgacattgtgtatgaagatatccgcgttgaagatgctcaggaaaagtttgtcgacatcaaggtattggattccaagtactcattggatcgaaaacgcggaagtgtcgaaaatatatatttccgtaacgtggaaattctgaatggtaatttccctgtttctattattcgcggttttgagatgcatacggaaatgagtcgcccccgaaatatctattttgacaatgtagtggttttaggcaaacaagtcgaatctcccagcgacttgcatatggtggtggaactctctgatgatattttgtttaatggtgcggcacacgcaaaaagaaatccattctaattgatatgcaggagtcccgataactaggaaagaaagacagcgtcttttagtcgctgtctttctttttataaagagacctgcttgctgggcaagtggttcaagttatatggggggattgcaaggaaaaagcggctcatgatgaacgaatatcggggtgcatggaagggcagtaacaattggttccatgtgttgatgaacgtttaaattctttttcaaaacaaaaagaggtataattagagaaaagctcaacatataatgcagcacaagtatcacagacaagggtgtgttacgatgaagcagaatgttgaggacagagccgccatgctgggggagtatatcgtagagaacaaagctactgtgcgccgtgccgcaaagcagtttggcgtgagtaaatccaccgtacataaggacgttgccgagcggctgcgccgcgtggatatggggctttacaaagaggtgagcagcgtactggcggtgaataaagcccagcgacatatccgcggcggtatggcgacaaagcgcaaatacgaggcacagaagaaatgagaaaagccctccgcaaacaaatacggagggcttaaattctatgcagctttaaatggctcggttagctttttacaggtacttcctgcgaggcctttttgtggcggctttccggtagtgtatacttgcttgtgaagcggttgtaatagccggtgaagcgcgggtcgccggaggttttgatctcgtttaagtaaccgtgtgtgtccatggtggaatctttgatctggatcaggcataccgcaatgttagagcagtgatcggaaacgcgctcgaaattgttgaggatgtctgagagcacgaagccgagctcaatggtgcacttgccttcctgtaagcggcggatgtggcggtttttcagttcaactttcaatgaatcgatgacctgttcgagcggctctacttcgtaggaaagctgtaagttgttctcgacaaacgcgtctgtcgtgatgttcaaaatctcgatgatggcacctgtgaagacctcaagctcctgctgggccttttcggagaatttcagatctttatcatgaatctcgcgtgcaacgcgcaggagattcaccgcgtggtcgccgatacgctcgaaatcgccgatggtatgcaacagctgcgaaacatcgttgctgtcggccgtggagaggtttttactggaaattttgacgaggtaagaaccgagcttatcctcgtactggtcgatggtttcttcgtttttctcgattttttctgctgtggcggaatcaaaatgcgagagcagaccgatggcatccaaaatggtgtcgcgcacaaggtctgccatttttgtggtggcattgcggcactccgcaatcgcgaaagacggagagagcagcagacgctcatcgagcaaaaccgcgtgcgggtcctgcttgccgggcttcaggcgcttatcacgcacggtgataacggcgagcttttcaagctgattgcagaagggcagcagaatgaacgtggtgatgaggttgaatgcggaatgcacgaccgcgatcataaacgaggagatcggctggtcggtgaatgtgaaatggaaaatgctgtttgcaatataaaagccggaaagacagatgacggtgccgagcacgttaaagtagatatgcacggcggtcacgcgctttgcgctttttgtggtgccgatggaggaaagcagcgccgtgatacatgtaccgatgttctggcccataatgaccggcagcgccatgctgaacgaaatgctgcccgtcatggcgagagactgcagaatgccgagcgaagcagcggagctctggatgagtgccgtgatgcctgcgccgactaaaatggcgacgatggggttatcgagaatcgttaagacctctttaaactgcggcaagtccgcaagcggttttaccgcgccgctcatcatggtcatgccggtcatcaaaatggcgaatccgacacatacggagccgatgtcctttttcttgctgctcttggtgaacatgatgagaatgatgccgatgagcgccacgatgggcgaaaagctctccggctttaaaagctgtacgaaaacgttgtcgctcgtgatgccggaaaggcttaagatccacgcagtgacggtggtaccgatgtttgagcccatgatgacgccgatggtttgcccaagctccatgatgccggagttgacgaggccgaccagcatgaccgtcatagcagaggaggactggatcgcaatggtgatgcccatgccgagcaaaagggccttaaagcggttcgaggtcatggaacgcaaaatacgttcgagcttgccgccgaccattttttcaaggctggaggaaagcaaatgcatgccgtagaggaagaacgcaagtccgccaaagagtgtaataacggagaaaatgtccatttgtggttgcagctcctttgtgtgcgcaaaacgctcgcttttcaaatttttttcttttttcttacttaatctttatatacaagcttattctaacataggtgacggcgggaattcaatgcttttttgataaaaaacgtcgaaagagaaaattatcttgccttgacccgcggcgagcatcgcggtatactgtatttatattttaggcgcgttttaggcaaacgcatttgaatacttgaaaaataaggtgggaaacgtgatgaaaacggcggcaattttggtggcggcgggcagctctgcacgtatgaaaagcggcggcgcttcgaaaacgatgatggagatcggcggcgagccggttctgagccgtacactgcgcgcgtttgagaatgccgcgtgcatctcaaagatcgttattgtggcgcgtgcgtgcgatttcgatgcaatccaaaaagcgtcggcgttcgtcacaaagccgctcacgattaccgagggcggcaaggagcggcaggattccgtttcaaacggtgcggcgctttgcggtgacgcagagtatatcgccgtgcacgatgcggcgcgaccgtttatcacgccggaggaaatcgaaaccgtgtgcgcggacgcggaaaaatacggcgcggcgacgttggcggtgccggtaaaagacaccatcaaggttgctgcggcggacggcacggtgtgcgctacgccggagagaagcactttgcgtgccattcagacgccgcaggtattccgcctttctttgtataaagaagcgctgtgccttgcgaaaaacgccggaaagcaatatacggacgattgccagctcattgaagcggcgggcggcaaggtatatttgaccccgggcgactacaaaaacatcaagatcacaacgccggaggatctgcttgtggcagaggcttttgcggcggaaaagtaaaggagtgttactatgcggatcggtcacggttatgacgtacacaagcttgtagaaaacagaaagctcattttgggcggcgtgcatatcccgtatgaaaagggccttttggggcattccgatgcggacgtgctcgcgcatgccgtagcggatgctttgctcggcgcggcgacgctcggggacatcggcgtgcttttcccggacgatgacccgcagtacgccggtgcggacagcttaaagttgcttgcggtggcggtggcggcggtacgccgcaagggctttggaattgaaaatatcgatgcgacgattttggcacagcgtccgaagctgcgcccgtacatcgatgagatgcgccgcaacattgcatccgcctgcaacctcgatctcgattgcgtgagcatcaaggcgacgacggaggagggcctcggctttaccggccgcggcgagggtattgcagcgcatgcggtgtgcctgctgaaataaatttacagtatttttgagagcttcgcttcggcggggctcttttttgcaccaattcccggcttgtctcatattctgttttgatgagactgttttgaaggcttggaggtgcttgcaatggaaaacaaaagagacacgggcgggaagcggcttattgttgtcagcagcgtgacctatgcgctgaaaagccgtgatctgctttttcaaagagggataaaagcctacattgagcggctgccgcgcacccgagaaagcggctgcggctatggtgtatatgttccgcagcgcacggacgaagcggagtgcattttgcgggatgcaggcgtgaaagtgttctaccgtgcggaacggggcgaaaagaaatgatctatctcgataacagcgcgacgacgtacccaaagccgctttcggtgcgccgcaaaatggcgcaggcgctggagcagttcggcgcgaaccccggtcgcggcgggtttaaaatgagcttgcagacggcgcaggcggtctacgatgtgcggcagaaggcggcgagctttttcggagcggcgggcccggagtgcatctcgtttcagccgagctgcacgcagtcgctgaatatcgttatccactcgttaaagcgtggcgaccatgtgcttgtgaccgatttggagcacaatgcggttttgcggccgctgaaagccatggaggcgcacggtgtttcgtttaccgttgtgcccgtgacgcccggcgacaacgacgcgacgctcgacgcgttccgtcatgcgatgcgcgagaacacaaggttgtttgtctgcacgcaggcctcgaatgtattcggcatccgcgtgcctgtggagcggctggcggcgcttgcgcacatatacggcgcggagatctgcgtggacgcggcgcagtccggcggggtgattcccattcatgcggagcgcgacggtatcgattacctttgctgcgcaggacacaaggggttatacggtccgatgggcacgggtatgctcattacaaaaaacggcgaaaagctggaaagcctgatacagggcggcacgggtacgcgcgcgttggagttagaccagccgcgggaaatgccggagtaccttgaaagcggcacgcagaatgtgccgggcatcctcgcactcggcgcgggcatggattttgtgcgcacgaacggtgaatacatgctgcgggagagggaaatgcgccacattcgccgcgtatacgaggcattcaaaaacatgccgcatgttgttttatacaccgcaatgccggacacgatgtattttgtgccggtgctcggctttaacgtgcgcggcatgcagagtgaagaagtgggcgaggtacttgcaaagcggaacattgccgtgcgctgtgggctccactgtgcaccgctcgtacaccgcaaaatgggaacggacggtgaaacgcccgacggcgcggtgcgcgtttcgccgggtgcgttcacgaccgacagggacattacggaactgattcgcacggtctattcacttcgggctgaaagtgcggcgcgaaaagtcaaataaaaatgaacaaagtgtaaataaaaatcgaaaaatacagaaaagaacaggaaaaaacatacaattcccccttttcatccccacctctttgtgttaaactatatacagtacgcatttaggttttgtaaaaagtaaatcgtatggagcggatgtgcaccgtgtgcatgtaccgccgaatcctgtgcaaagaggtgaatgctttgaataaggtttttgaagccattgcttcctggtgggagtggatggtgagcattgccatgaattttcaatttaaagatgccgttgatattatcatcgttgcatttttgatctacggtgtggtcaagcttgtgcgcgaaacgcgcgcggggcagcttgtaaagggactttttctgcttgttattctgtttattatttcttcgtattttaatctggtgatggtcagccgcgtgctggcgtatttcttccagttcgctttcgtcgcaatcctcatcgtgtttcagccggaaatccgcaaggcgctcgagcaagtgggccgcaacaacgtcggacaatctattgcggctgtggtaacaggccgtgaccgcagctatgaccgcgcgcaaatccgcaaggcaatcaacgccgtggtagacggcgtgggcattttacagcagctcaaaatgggcgcgcttatcgtattcgagcgcaaaacgaagcttggcgacatcattgagaccggcacgcagattaactgcgagccttccggccagattgtgggcaatattttcttcaataaggcgcctttgcatgacggcgccatgatcattcgcgacggcatgattcatgcggcgggctgtattctgccgctgacgaaaaacacttcggtctctgcagagctcggtacgcgtcaccgcgcggcgctcggtgtcagtgaggaatcggatgccgtggtcgtggtggtttcggaagaaacggggcagatctccgtggctgtaaacggcgttttggcgcgccgctttacgcgcgatacgctgcgtgatgttttggaggggtacctcattccgcaggaagaagcttccaccgtgcgccgtaagttcggcgtgctgaaaagcaaaaggacggtgaagaagtgatggcaaaaatgtctaaggaacccagaaacgaagtaaaacaacgcttacgcgtgtttgaaaacaacacaattttgcttatcttttcatttcttgccgcggcggccgtctggtttgccatgatggcgagcaactccgaaagccgtgcgaccgtaatccgcaatgtgccgattaacgttgaaatttccgatacggcgcaggaagccggtgtgcgcgtgttcagcatgagcagcagcgcgacggatgtgagtattacgggcaactcactcatcacaagtaaggtgacgagtgaggacatcggcgttacggggacgctggatccttccgtcagcatgctgacgggcagcagcttgcaacagacgacgctttctctgcgcgcagcaaaaaagggcaacaccctcgccgaatacgaggtggaaagcgtttcgccgtccgagatcacagtggtgtatgataaatataaagaaacgcagctcactttggaaacaaattttcagtacactacggcggaaaattactatgcgccttctacgcccacactttctacggagcttatcacggtctccggcccggaaagcagcgtgaacaaggtggcgcgtgccgtgttggaatataagttcggcgaagagctcacgcagtcgaagtcgctttcctgcaaagtgacgttgtacgacgcgaacggcaatgtacttgacccaacggagctctatttgaagctgagcgacgacacggtggaggtttccattccggtgacgagccgacagacggtcaagctggaagcggatgtgcgcaatattccggacagctttgcctcgaaccgcatcacgatcgacccggcagaaattgaaattgccggcgacggtgaaacggtctcaaagtacacgaccctgacgctctccacgccgatcaacttcctggacgttacgccggaaaacaacacgttcacggtggctatcccggtgccgagcggcgtgacaaatgtgacgcgagtggaaaacgcgaccgttacattcaacctgaacggttacaaggaaacgtctgtgctgacgagcaacatcagcgtcaccaacgtgccggagggtatggaagcagagctttctacaaagacgctcacgctgaagatcatcggcacggcggcgcagatctcgaagctgacgggagattccgttttctgtacggtggatctttccacggtgacagacccgagcggcagcatggaagcgccggtgacggtgacgattaacaatgcggattcctgctgggcgaccggcagctacacggcgcatgtgacgctttcgccgaaaaccgaatcttccaccagtggcgcttcgaactaaataagcaaaatgaaaacccgccgagctgaaaagtttcggcgggtttgtgttttatggggagagtacattcagcgtagcgcgatcatgtcgccggtgaagtgcgaaagccagtcttttacggcgaacggtacgccggtggcctttaaaataacgatcaccaagatgatggcgatgagaataagcagcactttaagcgcaaattgcgggttgccgtgttggtgctcgtcttcgtgctccggcacatggtgttctttagcggtctgcttggcggtttcgggtttccgtgttttttcttccataacggcacctcttttctgcaaagatacagaatctttcatttccattttaccacatgcctttcctgttttctataatttatcgacttttttcttcgggaaaaatcaacaaaaattcgggaaataattttgcgctgagcgcgtataaaacaagacactttggtgtcttgttcagaaaacccatacagccgggcttcctacgacttgaacgtccacaggaagtttcgtggcaatgcaaagcattgcttactaccgttccttgttttctcgaacgcaaaagtgtttcgtcgtctgcggacgacgacttaaggcactgccttgagaatccgtaaactttcttgaagaaagtttaatcaaaggctttgttcgtcgctttgccgacagatggagaatgtgtttttctttttctacaaacagtttcgcagataattgtgaaattctgttgaataaccggcaaaaaaatgctaaaatattcttttagaaatgaaacgaatttacataggacacggttgccgcgcagtagttggggttgcgcggaaaatcgggcttttgatttaaagggtgaagcaaaatgatcttgcgaaaatgggaggtgcgtcctctcgataaggaacgcgcggcggcgtttgcacagacgtatggcgtgccgttcttcctcgcgatgctgatgaatattcgcggctttgacgatgccgcgcatctgcgggaatttcttggcgagggcgagccgctctccgacccgtttcttttaaaagatatggacaaagccgcggcgcgtattacccgcgcggtggacaacatggaaaaaatcgcggtttacggggattacgatgccgacggcgtgacttcgaccgccatgctgtattcgtaccttgaaacgcgtggtgcggacgtaatcttctacataccgcagcgcgagggcgaaggctacggcatgaacatcggcgccgtggaatacttaaaagagcaaggtgtgtcgcttattgtcacggtcgacaacggcatttcctccgtgcaggaggtagcgcgcgcgaacgagcttggcattgatgtggtcgtcaccgatcatcaccgcccgcaggagatattgcccgatgccgtggcggtcgtggacgcataccgaccggatgacacaagcccctataagcatttttccggtgtaggcattgcgtttaaattgcttatggcgctggaggacggcgcgggcgacgtggaagatctgttagaagcatacagcgatctcgcggctatcggcaccatcggcgatattgtgccgttgacgggcgaaaaccgtacgctgatccgcgcgggtcttgagcgtctttcacagagcgaccgcccgggcgtgcaggcacttttggaaaacgcaggcattgcaggcaaggcattgacgagcacgaatgtggcgtttacacttgtgccgcgcatcaacgcgacgggccgtatgggcgcgccggaacgcgccgtgcgcttgctcatcagcggctatgaagaggaagccgaggtattgagtgaggaaatctgcgccgataacgaggaacgccgccgcgtggaagcagagattgccgaagcggcgtttgcggatatcgaagcgaaaggatacatgaaagaccgcgtggtcgtggtggacggtgaaaactggcaccatggtgttatcggcattgtggcgtcccgtgtgacggagcgctgcggcaagccgtgtatgatcatttcgcgcggcgaaacagaggcgaagggcagcggcagaagcattgagggtttctcgctgtttgaagccatctgcgcgtgcggcgacttgctcctcaaattcggcggacatcccatggcggcgggtatcacgttgaagcccgaaaacatcgaagcgttccgcaagcgcatcaatcagtatgcggcggagcacttcccgcagatgcccacgcagacggtcacactggactgcaagctgaacccggcggcgctttcagtttccatggcgcaaagcctgacgcagttggagccgtttggaaacggcaacccgcagccggtgttcggtttattcaacatggagctttccaatatcacaccggtcggcggcggggggcatctgcgcctgaccttagaaaagaacggcgcggtcatcacggcgatgcgttttaatacaaagcccgaggagctgccgtaccacatcggcgataagatcgaccttgcggtacagctggaggcgcgcgaatttcgcggccagccgtcgctgactgtcatcgtgcgcgatatgaagtttgcagcgttcaatacggaaaaaaatatagcgtcgcttgcgagctttgaaaagtggcagcgcggcgaggtgctttccgcggaggataaaaacagattataccccgaccgtgcgtgcttagcagccatttaccgcgcactgcgcacggtgaacggtaaagagacggaccaggttcggtttgtttcgcagtttggaaaagatatgacactgggactctttaaaacggcgcttcttgtatttgaggagcgcggcttggtacacagcgaaattgcagacgatacatttacggcagcgctcatcgaaacgagcggcaaaacagatattacacgttccccggtgcttttggcactgcaataagggaacggaaggagtgaaaaacgatggcagaagcagcaaaaacgtatgcggaccttgtgtcactgatcgaaaatagcgaaaaagaatatgacctcgcgttgatcgaaaaagcgtataagtttgcggaggcagcgcatcagggacaggtgcggcgctccggcgagccgtacatcatccaccccattgcggtggcgtataagcttgtggaattcggcatggataccccgtccgtcgtggcaggtctgctgcatgacgtcattgaggacacgccggttacgtatgacgacattgtgaaagcgttcggtaaggagattgcaaacctgacggacggcgtgacaaagctcggcaagatcccgttctcctcccgtgaagagcagcaggcggaaaacctgcgcaaaatgctcattgcgatgagcgaggacatccgcgtgatcattattaaatttgcggaccgcatgcacaatttagcgacgctcgaatacgtagcgccgcagaagcagcgcgacaaggcgctggaatgtcttgaggtgtacgcacccattgcgcaccgtctcggtatgcgcaaggttaaggaatacatggaggacgtttctttaaagtaccttgaccctgtggcgtataaggagattgaagataaccttgaggcgcgcagcacaaagcgcaagcagtttattgagacaacgaaagaaatgatccgcagtcgtgtggagccgcttatcccgggcgtatacattgaagggcgcgtaaaaagcgtcaacggcatttatcgcaagatgttcattcagggtaagagctttgacgaaatttacgacgtgttcgccctgcgcgtaatcgtcgataccatcaacgattgctataatgtgctcggtatcattcatgatatgttcaccccgctgccgaaccgctttaaggactacatttccacgccgaagcagaacatgtaccagtccttgcacacgacggtcatcagcaaagagggcatcccgttcgaggtgcagattcgcacgtgggaaatgcaccatacggcagaatacggcatcgcggcgcactggaagtataagctcggcatgacgagcggcaacgaaaagcccgactcgctggagggccgcttgcagtggatccgcaacatgctcgataaccagtccgaaagtgaagatatcactgaccttgtgcgctccatcaagaccgatcttgcgccggaagaggtgttcgtcttcaccccgaaaggcgacgttatcaacctgccgatgggctctacggttatcgattttgcgtatgccattcattccgccgtcggcaaccgcatgattggtgcaaaggttgaccagaagatcgtgccgctcgattacaaggtaaaaacgggcgagatcattgagattttgacgacgaaggaggtcggtcgcggcccgaaccgcgactggctttccatcgtgcgaacaagcgaagcgcgcaataagatccgcgcatggttcaagaaagaaaagcgtgatgagaacatcgtagagggcaaggcagagctggagcgcgaatttaagcgcaacggcatcgtgatgagcgacgagctgatgcagttcatgctggaaagcgccggccgccgccacagctgcgtcacgcccgatgatttttacgcggccgtcggctacggcggcattcagctttggaagctcctgccgcgcgtaaaagaggaataccagaagacccacaagcctgcacccgaaccgcagcaggagattgcgcagcagaccccgccaccgaacctcaacaagaaagcggcaggcggcgtgctcgtggagggtatggacaactgtctcatcaagttctcccgctgctgcaacccgctgccgggcgatgagatcgtcggcttcattacgcgcggtttcggcgtttccatccacaaacgcagctgctcgaacgtgccgaaggatttctcgcaggcgccggagccggagcgctgggtgcgtgcgcactgggcgggtgaagtcaaggaagagttcaagtctacgctgcatattgtggcaaccgaccgttccggtctgctcgcagacgtgacccagcagcttttcaacatgcacatttttattcactcgctcaactcccgcgagatcaaaaactcggagaatgccgtcatttcggcaacgattaccatcaacggcctttcgcacctgcagaccgttattgaccgcttgcagaagattaaaggcgtaatctctattgaccgcagctaaaggtaaacaaagatatgaaatataaatgtataacgggcgggcctatttcggaaaattgctacctgctcatcgacgaaaaaacgaatcaggcggcggtcgttgaccccggctttttgaacgacgtactgttaaatgaaattaaaaaatatacggtgcagagaattttgctgacacacggccattttgaccacatttgggaggctgaccgcctgcacgagatgctcggtgtgccggtgtgcgcctatgagacggaagcggcgtttgcagcggacgataagcaaaacggctcgcttctcatgatgtacgagtccatcacctgcaaggtgcacgaggctttcaaagacggtgaaacatttcagatcggcgaagtgccggtcacggtgctgcacacgcccggccacaccgcgggcggcgtgagttacattacgccggacgctgtgtttacgggcgatacgctgatgggctactccgtcgggcggtgcgacctgccaaccggcaacagtgccgagctgcgcgagtctctgaaaaagcttgcggcgctgcccggaaatcccgatatctgcggcggccacggccccgtaacgatgctggaagacgaaaagcgccgaaatccgtatttataaaggaaaatgtatggttttatatattatcgatcacccttatcactatgaggcggaaaacctctgccgcgtgttttacccgtttgataaagtcacggtacagcacgaatttatgccgagcgatgaaaaccgcacggtgtacaccgccgaagaaaacggcgaatatatcgtgcgcattgaagacgcagacggcaaaacggagcgcaaagcaaaagtaggcgcagagaccgaatacggcatggtgtctttattatttgatgcattttgcgcccacacgggcaaaatgccgcgctggggtatgctgacaggcattcaccccattaagctcctgcgccagctgaccgaacagcacggcgaagcggaagcggcaaggctgttccgtgaaaaatatttcgtctcaaacgaaaaaacggcacttgcggtgcgcaccttgcgcgcacaaaagcccattacggataaagtgcgtgaaaacgactactctttgtacatttccgtgccgttttgccccacgcgctgcgcgtactgctcattcgtttcgcagagcgtggaaaaggccaagaaacagatcccggaatatcaccgcctgcttttggaagagctgcaagagacggcgaaagtcgccgatgctttgagcttaaacctgcgcgctgtgtatgtcgggggcggcacacccacgacgttctccgcagagcagctttccgagatgatccgcgttgtgaaagattcgttcgacatgtcgcagtgcgaggaacttacggtggaggccggccgcccggataccattgaccgtgcaaagctggatgcgctgcttaaaagcggcgtttcgcgtatcagcatcaacccgcaaaccttgcaggacaacgtgctcgaaaacatcggccgccgccacacggcgcagcagactgtggatgcgtttcacctcgcgcgggaagcgggctttacgaatatcaatatggacctcattgtcggcttgccgggtgacacgtatgagacgttctgtgacacaatcgaaaaggtcattgcgcttgaccctgagaacgtgacggtgcactcgctcgcattgaagcgctcctcgttcatcacgcagagcggcgagatcaacaaggcccacgccgatgccgagcttgccgaccgcatgatggcttatgccgaaaagcggctgacagagcgggggcttgagccgtattatctctatcgccaaagccgcatggcgggcaatttggagaatacgggctgggcaaagccgggcaccgagtgtgcatataatattttcacgatggatgagaccgaaacggtgctggcgtgcggcgcaggcggcgtgacgaagcttaagaacccgtattccgaagatctttcacgcatttttaacttcaaatattcgtatgaatatatcagccgttacccggagattctcgaacgaaaggagggcatcgcgaagcaatatgagcaatttcgcaagcggttacattaaatatatcaatcacttagagcagattaacgacgcggcgcttttgaacccgcaggtcatgatcgatgaggtggaggattcctatcacgagcacatcgagaacattgcgcgcaacattgtgacgcattacaaaaccgcgaaggtgtgcatgctggcggggccgtcctccagcggcaaaacgaccacggcgcatttattgcagcgcgagctcggcaagctcggtgtgcacgccgagattgtctcgcttgacgatttttaccttggcccggacgaaacgcccgtgctgccgaacggcgaaaaggactatgagaccgtggacgcgctcgacattgcgcttattcaggattgtttgaattccgtcattcacagcggctcctgccttttgccggagtacgattttacaacgaagacccgaacgcttgcggcaagaaagctcgatgtcagcgaccgcgggttcgttatcatggagggtttgcacgcgctgaatcccatttttacgcgtgatctgccggagggcagcaccataaagctgtatgtcagcgtgaagcagcagatcaaggacatcaacggcgaggtcatttcgccgatggatattcgccttgtgcgtcgcatctcgcgtgatatccgttcccgcgataccatgccggagcgcaccatcgccatgtgggataatgtggtggcgggcgaagataaatacatccgcccgtaccgcctttccgcggactacacggtgaactccattcatatctatgaaccgtgtgtgctgcgcaggcttgtcattccgcttctgcgcgaaatcccggaggataacccgtgttaccgtaaggcgcgcgatttagatgcccgtctgatgcgctttgagcccattgatgccgagctggtgcctgcaaactccatgctgcgtgaatttttgggtccgaaagtagaaaacggtacgaattaaggttattgtcaggaaaaatttaacctttgtttacaaaattgccggtttgtcatttgctttttgacacaaattgcgctataatgggactgaagaaaggtacatgaaacggtgtacttcttaaggttccgtttccaaaccacaaaaggagaatttgttatgggaatttttgatgatgttgttgtcaacgcaaaatccgctgcacagaccgtaggcaaaatggcaggccagtttgtggatatgtccaagctgcgcatcaatatgtccgagctgaacggcgagattacgaagcgctatcaggaacttggccgcttcatttacgaggccaagaaggccggttccgcagacgaagccgagcttgcagaccagatcgccggtatcgatgatctgtatgcacagctttccgcagtttccgcacagtacgcttccatgcagaataaagtgacttgcccggcatgtggcaagaagatgccgacggattccttgttctgcagccactgcggcgcaaagctggagaacgcaccggcagagccggaagaagctgccgaagcagtcgagaaggccgaagtccccgcagagccggagacgacggaagtcacaatcgagacagagaagacggctgagccgaccgaggaagtcaagaccgaggaataattgaaaacgcgggtccggcctgcaaggatgtaaaaccagaaggaaagaggtgccccctctttccttttctttcgccgagaaacttttttgaaacggaagggttttatggagcaaaaacggcccgcggtgcgcgtgcagcagggatttctgcacggtgcgttcattttaatgttcggcgttcttctggtgaaggccattggggcgttgtttaaaatcccgttatcgagtatcatcacggaagacggtatgggatatttcagcacggcgtacagtttttttaacgtgctgttcagcctttccaccgtcggctttcccgtggcagtggcgcggctgactgcggcggaggacgccttaggacattttcgtgacgtgcggcaaatcaaagcggcggcgctgccggtgttttcggtcatcggcgttctatgtgctctgctgatggcaagttttgcaccgctttatacgcacttggtgcaaagccccggcgcacttttctccatgttggcgcttgcgccgtgtgccgcgctgtgtagtatttcctccgtgtaccgcggttattttgagggtctgcgcaatatgctgcctacggcgtgttcgcaggttgcggaatcgctcggcaagcttattttcgggctttccggcgcgatttttgtgatgcatatgggcacacgggagctgcaagcgagcggcacggtattcggctgtaccgtgaaaagtgaagcagatggctgtcagcttgtctgcgctttgggtgctgctgccgcaatcctcggcgtgacgctcggcgcggtgctgggacttttgatgcttgtcttccaaagtcgcagggacggcgtcacaaaagcgatgctgcaacgtgcgccgaagccgaaaagcaagcgtatttgggccggaaaattgctgcgcactgcactgcctatttcgcttggggcagtcgccatgagcttttcgggactcattgatgcgtcatttttgcagacgcgtgtcgcctatgccgtgcagacagaccccgcagcgttgctttccatgtacgccggcgcgatccccaaagggaatctcgacgcgccggaaaccgtgccgaactaccttttcggctgctacaatatggcgctgaccctctttttgctcgtgccaagcgtaacgcagtcgttcggggtcagcgcgctgccgagcgtgacacgggcattccagacgggggattcgcagaaactgaagcgcaccgtggaagcggtgctgcgtattacgtttttgacggcactgccgatgggggtggggatttccgttttggcgcagcccaccgcactgctgatctacggtgcacggccgggcacggtcatcgtggggcgcgtgctgacgactttgggcgcggcgtccgtttttgcggcgctgtgcgggccgctgaacagcgtcttgcaggcgatgggccatgtggagctgcccgtggtgctgacgctcattgggctattcgtaaaagccgtgctcgattacacgcttgccgctgtgccgcgtgtgaacgtgcttggcggcgctgttggcacgctcgtgtgctatgcgctcgcaagtgtgttggcgtgcattgcgatacggcgtattgcaggcgtgaaaatagatttcttttccacttttaaaaagccgtttctggcatccgtttgctgtggcgtggcggctcttttaacacacaaagcatggtgtgcggtgctgccggaatcgcgtttttccgcgctgcctgcggtgtttttgggggcgcttatctatgtcgttttcctgctgattgcacgcgggatctgtgaagaagacatcaaagcactgccaaacggagaaaaaattacaaaaagacttgaaaaatacttgcaaaaaacagggggatagggtaaaatatgaaagctgcgttgaaatatgtaggaaaatcccgttatacactggaagatctcaaggaaatcatcacgattctgcgtgcgccggacggctgcccgtgggaccgcgagcaggatcacaagagcatccgccgcgattttcttgaggagtgctacgaagcgatagaagccatcgatacggaagaccccgtgctgctgcgcgaggagcttggggatgtgctttttcaggtggcgttccacagtgagctcgagcgtgaagccggtcggttcgaccttgacgatgtgatcagcgacgttgctgccaaaatggtgcagcgtcacccgcatgtgtttgccgatgtgacggcggacacgaccgagcaggtgttgacaaactgggatcagattaagcgcgagacgaaaaaacagaagtccgaccgcgaggtgcttgaaagcgtaacgcccgccatgcccgctttgatgcgtacccagaaggtactgaaaaaggcggcgaaaatgggcgcggataacggcacgaccgatgacctgcgcgcgagcgtttgcaaagctgtaagcggtgcaaccgaagaaaacggcgcggaatcgattggcaaagcgcttttcaatttaacggagctcgcacgccgtctcggcgtagatgcagagcaggcgctgtctgaagcctgccgcgcctatattgagcagttcggcgcagaagaaaaaagcaattcacgctccggcgatggttcgcgccgcgggtgatgaagataaatctaaaaatttggaggttattcataatgaataaaacagaactcattgctgctgttgcagaaaaggctaccatttccaagaaagacgcggaaaacgctgtttccgctgttatcgcttccatcacagagtccctcgcaggcggcgagaaggttcagatcgcaggtttcggcacctttgaagttcgcgagagaggcgagcgcgttggccgtgacccgagaacgagcgctgagatcgtgatcccggcttccaaggctccggcattcaaggccggcaaggccctgaaggaatctgtcaataagtaattttggcaaataatttgtgatggaacggatcccgaagtgggtccgttcttctgttataggcagctttatgcctccatgtattaaagaaaaggagtttgaacatgagactggataaatacttgaaggtttcccgcattatcaagcgccgcaccgtggcaaacgaagcctgcgacgccggtcgagtcgtcgtcaacggcaagattgcccgcgcttcctacgatgtgaaggtgaacgatgtcatcgagctcacgctcggcgcgcgcaccgtgaaggcccgcgtcgtttccgtgaatgaatatgcaaaaaaagacgaagcggctatgatgtacgagatcatcgaagaaaagtaagttttttttgactgtgcttttaacgtgctgagctgctcttttgcataaatattcgctgcttgttcggtctttttccgaaaatcgctgcatataaataggcgatacagcataaaagaggatcggtgatacagtggcacagacggcaagcgcaaaagcacattctttgcacattgaaaaccgctcgcgtcttacggcaagcggcgttacgcgcgtggattttttcagcgagacgctcatcacggtgcagacggcagatggaaggttgcacattaaaggcgaagggctgtacattgaaaacatgagcgccgaaacaggcgagctgctcgtaaagggccgcgtgctggcgctttcgtacacagacggcgtgcgcccgacgggcgttttgaaaaggcttttaaaatgagcggcattccggcagaaacgctgttgctgtgccttgtgtgcggcgttcttctgggggttgtgtttgccgtgctggagtttttgcgcctgctgttctctctcggcaaaatcgcggcagcggttacggatgtgctgttttgtctttttgccgccgtcgtcacgtttttgctgtcccttgcggtcagcgccgggcacgcgcgcttttttcagatcgcttgcgaagtcatcggctttttatgcgtgcaggtcacggtgacgcacggcatttgccgattttttccgtatgcagagcgccgcttgcacggctttggaaaccgaatttttgcaaaatacgcgcaaggacggcggaaaaaggtggaagcattgctaaaaagcgggaaaaaacacaaatcatttctgaacaaatcgaaaaaaagcaaaaaaaggacttgaataatgacggcgcatcattatataatggaacaagaaaagcagccgaacgctcggcataaggaaaggggaggaatcccatggaagaagtcaagattaaacgctataagggcagcctccttttaaaggtcgccgtgttctgttttgcgtgcttcatggtcactatgctcgtcgggcagcagatctccatcagccagaaaaaggacgaactgcagcagttgaaaaacgagcttaaggaacagcaggtcgtcaacgacgagctgcgctatgacctgaatgaagagaacgcagacaacacagactatgcggagaaggtggcacgccgcgaactggactatgtaaagcccggcgagcgtgtgttctacaatgtaggcggcaacaactaacaaatttgaaatcccggaggaaaattagagggtatgcaggaaacaaagcttgaggtcggagcaatttttgagggcaaggtaacgggcatcacaaagttcggcgcattcgtcgatctcggtaacggcaagaccggtatggtgcacatttcagaggttgccccggtcttcgtaaaggagattcgcgatttcgtcacggaaggccagaccgtgaaggtcaagatcatcggcatcaatgaagacggcaagatcagcctttccatgaaaaaggcagacgaaaacgcgcagcagcagcgccccccgcgccgccgcgatgagaacggcagacccccgcgccagaacaactatcaccgccgcgaagcttctgccccggtgcagagccccgcaagaccgggcgattatgagtggcgtgcgcgcgaaaactccggctcttttgaagatatgatgtcccgctttaagcagatgagcgatgagaagatctcggacctcaagcgtgcggaaaataagcgcggcggcggttattcccgcaagggcccgcgcaacaactaaagtaaagcagaaacggcgctgttcttcggaacggcgctttttgttttataagaaatttaaatcgcaaacaaattgtttataaatcttgaaaattttatttttctattgcaatttttgttcaaatgctttatactgtaggtacagagaacggcagaagccgtaagctgaataatgaaagccgagtctttcagaaaggatgtgttttttccgtagatgaaaaaaagcacatccctttgtgctttttgcgggaaaaaccggtagacgtatgaacatcaagatcgttggcagaaaagtgaacctgagagagaattttaaggaactggtgcagcgcaagctctctaagtttgaccgcatctttgatgaagacgcggatgctaccgtaaccgtaacgctggaaaagaatcgccagaccgtggagattatgattaagcagcgcggcatgctgtaccgtgcagaagccactgcgccggaaatgaacgaagcgttggatgacgttgtggcggcactgggcaaccagatccgtagaaataaaaagcgccttgagcgcgcacagaagatgcagcccgtggagctgccggatacgtactacgatacgccggacgaggaagacgagccggaaatcgcaaagcgcaagacgttctatgtgaaggtcatgacggtggaagaagccattttgcagatggaaatgctgggccacacgttcttcatgtaccgtgacggcgacaccggcgagattgatgtggtgtataagcgccgcgacggcaagtacggcgtgctggagccggaaggctgattgaaactaaaatagaaatttaatttgtcgattattggcggcgcctcacttgaggcgtcgctttttttcattttttaacggaatttgcgatatttgtatatatacaatatcccgaaaatgcttgagaaatcgggtgcaaaatgctataatgcccgtgaaattcgcagacaggcatttaaaacgttacggtatatgaaaaataaagcatttcggaggtctatatggaggagacgcaaaaggaaaagcaagcggtgccggagcccatcgacatcatcacgcttttgcacgatgtgctgcgtggtgtgaaaaagctgtggtgggcgtgccttttgctcacgatactgtgcgccgcgggctcgtggtacacggcaaaacgcgcgtatcgcccgatgtaccgcgcggcggcttcgttcacggtcgccaccggcagcggggaaagcggcgggttcagctacgggttttattacaacaccgccacggcttcgcagctcgcgcgcacgttcccgtacatactcgaaagcgagctcttaacggatggcatcaagcaggcgctcggcacggattctattacagcttcgctttcggcgagcgcagtggaggattccaacctgttcacgctgactgcgacgggcgcgaatgccgaaagcacgttgaatgtcctgaacgccgctatggattgttacccggaggctgcacgctacgtgctgggcgacattaagctcagtatgctgagcgccccaagcctgccgaccacgccgtataatatattcgacggtaaacgtgcggcgttgacgggcgcggcgtacggcctgctttttggcgcaggactgatcctgctgtacggctgcacacggcgcaccgtgcggcgcgaggaggagattgcatctaagctgcatcttttgtgtctcggcacgctgccgaaggtcgtttttaaaaagcgaagcaaaagtaggcgcgaaacgctcacccttacgaacccgcatgtgccggagcattaccgcgaggctgcgcgcgggcttgccatgcgccttgaacgccgcatggcggcatcgggcgacaaggtgctgctgttttgcggcacgctgcccggggaaggcgtgcgcaccacggcgatgactgccgcgcatgtgctgggcgaaatgggcaaaagcgtggtactgatcgatttagatttaaagcgcggcatggataaacgctcgccgggactggaagcgtgtctttttgggcactgcccggtacaggaggtgctgcatcggcgcggtgcagagccgtatcgctacgccgcgtgcagccgcgggctttcgccgcgcgaggtgctcgctgttggcgaaaatctgcgcggcgcgattgcttctctgcgcgaagacgcggactgcgttttgctcattgccccggaaagcgcgcgctttgcggaaattctgcccgcggcggaaagctgcgatgcggcggtgtacgtcatcgagcaggatcgcgcatcgcggacgaagatcaaagcgggtatcgaaaagctcctaagctgcgatgtgaccgttgcgggctgcgtgctgaacggcgtacaggcggggatttccggctacggttacggcaaatacggttatggctacggatacggaaaatacggttgctacgggcattacggctacggccattacggcgcgcaccgcacacgggaggagacggtatgagctatatcgacctacacgcgcatgtgctgcccggcgtggatgacggcgcggaaacgcttgaagcgtctctcatgatgctgcgtatggcatcagagcatggcacgaaagctttagccgtcacgccgcacggggcgggggtgacgaagacgcagtatttgggaaaatttgagcgtctaaaagcggcggctgcgcgggaaagtctgcccgtaaagctctttttcggcatggaaatgatggcggacggcacgctgtttgaccgcctgcaaagcggcgacatgcagccgctcggcgaaagccggtttcttttggtggagtttgacccgctcgactcgtcggaatggtgcgcggcggcgacggagcatatacgaaaatacgggtatgtgccgctcatcgcacacccggagcggtacgtcattttgcaaaacgaaccttggcgcgcggagctgtggacagagcggggggccgcgctgcaggtgacgcgcagcggtattttcggcgctttcgggcgcagggcggcagagaccgcgcggatgctgctggagcgcgatctggctttttgcgtggcgagcgacgggcacggggccgcgtaccgcagaccgattttggaggacgtgaacgcgtggctcacggagcacttcggtgctgcgtatgccgagcggatgctgcatgaaaacccacgcagaattctgagcggcgaagccggaaaggagagaatcgcatgagggtatttcaaatggtaatggcagtgctgttctgcgccgcactgacgttttacctgtgggttgccgtgccgcgcgtacaggcgcaggacacatccatgcccgttttgacggacgaaacggacggcgaacttgcgctcagcgtcaccgcgccggaaagcgcgtattgcgcggggctgcatgccgaagacacgcatgacggagacctgacggatgagatctgcatcgcgggtatgtccgcgctgttggacggcgaccgtcggcgcataaaatacgtggtgttcgatgcggactgccacgcggcgacgctcacgcgcacggtgcggtatacggattacaacccgccgcgctttgcgctgaatgtaccgtcgacctaccgcacgggcgagatgcccgcgcttttggcgcagatcacagcggaggacgtaatggacggcgacgtttccgaccgtattcgactgttcaccgaagatattacttttgtggaaaacgacatgtacacgctgccggtatccgtgacgaattcctacggcggacagagcgagatgcagctttatatgcagctgagcgacagcagtcttgaaattcgcctgaagcagggaatcgtgtatgtgaaggcaggcgaaaagtttgagccgaaggcctatttggagggcgtgtttgaccatgcaggtacggcggtaaaggtgaagaagcagacagtgacgcaaatagataccgcaaagcccggctgttacccggtgcagtatgcggcagagacggaaacagagaccgttcgcgcctgcctgacggtgatcgtagaggaggggaaaacgtgaaggacgagcgccttttttggggcgacctgcaccctgtgtgcgtgctgcgcggactgctctataatctgtgggtgctgattttggcggtgctcacggcatggctgtgcgtggaggggtatcatctttttacgtatcaccctgtgtataccgcttcggcgaccgtggcggtaaatgtaaagggcggcacgagcgcgtatacctctttagatctcacggcccgcatggcgcaggtgtttgcgagcgtgtttcaaagcgatacgttccgcgaggccgcgcagtgcgacgttgtggcttccgttttgccggagacgaaccttatcaatgtgcaggtgacggcggagaacccgcgcgaatcgtttttatcgctgaaaaatgtgcttgaaaaccacgcagacctgacggacgaactgttctcaaacgccgagctgcgcgtcatccgcgacccgcaggtgccgcttgccccttcaaacccggtggacttaaagccgtaccgcatgcgggcctgtgtgggtgcgatgctggctgcatcgctgattgtatcggttttgtttctgcggcgcgatacggtgcaaactccgcaggccgcgcggcacaagctggatgggcgcgtgctgggcaccatcgggcacgagcgcaaggaaaagcggctgttcgtaaaaaagagccgcggtgcggggcgcaaggctgcggcgctgctgacagacccttttgtgcggtacacctacacggaagcgtatcaggatctctgcgcggcgttggagcaccgcatgcggcgggacggcaaaaaagtgctgttgcttacgggcgcgggagaaaacgaaggaaaatcaagcgtagcggcaaatttggcgctggcgctttccatgcgcgggcggcatgtgctgctgttggatctcgatttaagaaagccggcattgcacaaaattttcggcctgcgggcggcggctaaaaacgggatcgggcagtatttgcaggcagagaaagccgcggagccgccgcttattttttcggaaaaatacggcatttcgctcggccttaccgcgcccgccgcgcacccggagcgccttttgcacagtgaaaaactgaaaaagctgcttttggcggcgcgggcggacgaacgctttgactacgttttgctcgactccccaccgatgctgctttccgccgatgccgaggcgctcagtgcgctttcggatctttcggtgctcgttgtgcgacaggactacactccggccggtatagtaaacgactgcgccgacgcgctcacgcagagcgggacggattttgccggatttatcctgaatgatttttacgcggctgtgcacccgcagcagctttttgcagtgcggacggcttcgtcaaaatagtgccttgtagctaaaaatgcagatgttttgtcggcgttttactgattttgacggctttttgttcaaatccgttgacgcacaacgggtaaaagcgatataataactcggataaggcactgccgcggaatgcgcggcgcgccgaattttcccgaaacgtcaaaatcaaaggagtacacgatatgagcaaatggaaggaacggatcccgggcattgtgatctctgtccttttggtggcagtgtttgccgtgtttatggtgatccttctgcaaagcaagatggtgccgacgaagctgctgatccttggcggtattgcacttgtccttttggtggcttctgctgttttgctggtgcgcagcatccgaaataaaggtcagttcatctgcggcgcgtcgctttctctggtgctggcgctggtgcttggtcttgcgagcaactacatttcggtcgcgaccggcacgctgacggagattggcacggtgcgcacggaatatacgcccgtagcggtctatgtgcgcacggatgacccggcttccgcgttggaagacacaaagggctatacgttcggcattttggaatcgcttgaccgcgaaagcaccgattccgccgtcagccagatcacggagcgctttggcagcgcagtgacaacgaagacgtatgccggcatcacacagcttatcgacggcctgctcaacaaagaatgcggtgcgatcatcctaaatactgcatacatcgacgttgtgacggagctcgataaatacgccgatgtagaaagcaaaattcgcgagcttgaagtgctgcacgtggaaacggcggtgcagagcgaagcggaaaagacgcagagcaccggcaacagcgatgcggaaaatcgtatttacaccctgtatatcagcggcagcgatacgcgtcagggccttaacacggtcggccgcagcgacgtaaacattttggcgacaatcaatacggaaacgcgccagattctgcttgtgacgaccccacgcgactactatgtaccgctgcctgtttcgggcggcatcccggataagctgacacatgcgggtatttacggcgtgaacgtttccataggcacgctcgaaatgctgtatgatacggatatcgattactacttccgcctcaatttctccggctttaccggcattgtggatgcgctcggcggcattacggtcgataacgatgttgcgtttacaaaggacaactacacgtacccggtgggcaaggtgcagatggacggcaaaatggcactgacctttgcccgcgagcgctattcgtttgtggatggcgatattcagcgcggtaaaaaccagctgaaggttatttctgccatcatcgataaggcacttcccccggatattctggtgcgctacaactccattatggacagcatcaaggactgcttcgagatggacgtgccgtatgacgacatcgcggcgctcgtgcgccgtcagctttccgataacggctcttggaacattgtccaatgcagcgtgaccggcacgggcgattcgcagatcccgtattccatgagcgattacgcctacgtcatgcgtccggattataacaccgtaaataaggcaaaagagctgatgcaggctgttaaggacggcaaaacgctttcgaagaccgatacgaacattacggatgcggaccgcacaagatatgcttctatgccgggcgaccccgcagcctcgtacacgagcagcggaagcggtacccagagcagctccagcaacaactacagctactccgacagcaacgattacagctattcgggcggctccgataattccggctacgaagagccttctgtgccctccgaaccctccggcggcgaaacgtcgtctgaacctgcgggcggtgacgagacaccgcctgagccttccggcggcgaagagatcccctccgaaccctccggcggcgacgagacacccgcagagccggatcccggcacaaacagcggcgaaacaatcgcagagcctgcggcctaaatgagatttcataccatgtaaactttttcccccgaagcccttgcggttttcgggggaattctttataattattatgaggtgttttggctattcagtatgcgacaaggagaaactatgcaccgaagaagaaaattgcccgaaaacggcgttgtcattgtgcttggcgcacgggtggtgggggcatcgaaaacctgccccgcgcacctcagtcgcgcgtttcaatatcgtgtggatactgcagcatcgtatctaaaagcctatccgaaagccgtttgtatcacgaccggcgggcagggcaaggacgagccgcaaagcgagggcgaagccgcaaaggaagcgctgattaagttcggggttgcgccgaagcgcatctttgcggaagtaaactccaaaacgacgcttgaaaacctgcgttttgcgcgggatattctgcgcgaaaatggcctttccgataccgttttgcttgcaacgcaaagttaccaccagtggcgcgcctgccgcatggcaaaaatgttgggacttacgccgtatccgctgcatgcgaataccaatttgaaaagtctgccgaaaaatctgtgccgagaatttctggctatcctgaaattcctgctgtttacccgaaaggaatgagacgaatggaacaagagcaaaagcgcttgctgatccgcggtgcgcgcattttgaaccccgcgcgcggcgaggattatatcggcaatattttgatctccggggaccgcatcagcgcggtttccgaaaacctgtacgatgcggatgccgaagtcattgaagcaaaaggtttaacggcggtgccgggctttgtggatatgcatgtgcatctgcgtgaccctggttttaccgataaagaagatatttacacgggctgccgtgcggctgcggcgggcggcgtgacgagccttttgtgtatgccgaacacgaagccggcggttgatacgcccgagactgtgcgctatattttggacaaagctaagaccgccgatgcgcatgtttacgttgcggcggcgattacaaaggggctgaaaggtgaagagctgtgcgacttagaagcgctgcacgatgccggcgccattgctttgagcgacgacggtcgcccggtcatcgataccgcctgccttgtaaaggcattatgcgaagcgccgaagctccacatgcgcgtgacggcgcactgcgaagatttgttcctcgcgaaaaagtgggtcatgcatgagggagaagtttccgaaaagctcaatctgcccggcgtacctgcggcggcggaggactgcggcacggcgcgcgaaattgcggcggctgcggcgtatgacgtgccggtgcacatctgccatgtcagcacggcaacctctgcggcgctcatccgtgatgccaaagcccgcggcgtaaaggtgacggcggagaccgcaccgcactacttgcttttgaccgacgaagcgctcgaaaagcacgacgcggactaccgcatgaacccgccgctgcgcagcgagaaggaccgccttgcgatgatcgaggccgtaaaggacggcacgatcgacgtcatcgcgaccgaccacgcgccgcacacgccggcggaaaaagctgattttctgcacgcgccgaacggctccatcggtatggaaacgtcgtttgcggcggcatataccgcgcttgtgaagaccggcgttttgacgcttacagagctcatcgaaaagatgagcgtgcgcccggcggagctgctcggcattgaagccggcgccatcggtgcgggcgaagtggccgatattgcactgattgacgagcacgaagcgtgggttgtggaccccgaaaagctgcacggcaaaagccgcaacacgccgtttaagggcatgacgctcacgggccgcgtaaaggcgaccgtctgtggcggcagagttgtatttaatgaactgtaaaagtttgagaaatttgaaattatagatttgaaatgagagagggattactatgtcttttgaccgtatgattgaaaaaatcgtggaaacccagaatccgaccgttgcgggtcttgacccgaagctcgcgtacattccgtcctacatcctggacggcgccgtcgcaaagtatggcaaaacgctggaggctgcggccgccgcactgctcgaatacaacaagggcctcatcgacgcgctgtgcgatattgtcccggccgtaaagccgcaggcggcgtactatgaaatgtacggctggcagggcgtgagaacccttgcggagaccgtcgcttacgcgcgcgcaaagggtatgtttgtcatcacggacggcaagcgcaacgatatcggtaccacgatggaagcctacgccacggcgcacctcggcaaaacggatgtgttcggcgagaaaacggaagccttcggtgcggacgcgctgaccgtgaatggctacctcggcacggatggcatcaagccgctgctcggcgtttgcgaagcggaagataagggcattttcgtgctcgtgaagacctccaacccgtcctccggtgaattgcaggatcagaaaatggaaagcggcaagaccgtttacgaaaccatgggcgagttctgcgagcactggggcgaaactgtcatgggtaaatacggctactccggcgtcggcgcggtcgtcggcgcaacgtacccggcacagctcggcgaaatgcgcgagaaagcgccgcacacgttcttcctcgtgcccggttacggcgcacagggcggcggcgcggatgacgttgccccggcgtttgacaagaacggtctcggcgccatcatcaattcctctcgcggcattatgtgcgcatggcagaaggaaaagtgcgacgagcatgactatgcacaggcggcaagacgcgaagccattcgcatgcgcgacgagatctgcgcacgcatcggtgaaattcgcgcgaacggatgagtaacgctcggaaaggacaagctatgaaatatgacgttcagctctgcgaggtactgcgccgcgcgcagaccgcagagaacacctttgattatacggttttagcgccgaaactggcagaagtggcgcagcccggacagtttgcacacatttacgtgcccggtaaaacgctgcgccgcccgatttccatttgtgacatcgataagaaaaacggcacgctgcgctttgtgttccagattcgcggcgcgggtacagagcagctctcgaagtttgaggtcggcgacaagatggatattttggcacccctcggccacggctttacgttcgacccgaacgcgcacaatttgttcatcggcggcggtattggtgtgcctccgcttttcggcgcagcaaggcagtgcggcaaaaacgccacggtggcggtcggtttccgcaataaggatttcgtaattttggaagacgacttccatgcggcaggctgcgacctgcgcattgcgacggatgacggcagctacggccaccacggccttgtcatcgatttaattcaggatgtgcaccccgataaaatttttgcctgcggcccgaaggtcatgctgcgcgccgtgacggagtttgcaaaagcgcacaacattccgtgcgaaatttcccttgaggagcgcatggcgtgcggcatcggtgcgtgcctcggttgcgcggtggagctttacgacgaaaacggtgaaacgtatatgggccatgtctgtaaggacggcccggtgttcccggcggaaagggtggtattctgatggctgatttaaaggtttcggttgcgggtgtggagttccataacccgctcattgcggcgtccggcacgttcggcttcggtcgcgaatatgcagagttttacccgctctccgcactcggcggtatttcttctaagggcatcacgttaaaggcgcgaccgggcaatcctgcgccgcgcattgcggaagcccccggcggtatgctgaatgccgtgggtctgcaaaatccgggtgtcgatcacttcatcgaaaaagatctcccgtggctgcgcgagcaaggcgtgaccatcattgcgaacattgccggcaacacgccggaggattactgcgccatggcggaaaaactgaatgacaccgacatcgatatgatcgaaatgaacatttcctgcccgaacgtgaagcagggcggcgtgcagttcggcacgagctgcgcaggcgttgaagacatcacgaaagcggtgcgcgcgcattgcaaaaagccgctgatggtgaagctttccccgaatgtgacggatatttccgagatcgcgctcgcggcggaaagcgccggtgcggatgccgtctccatgatcaacacgctgaccggcatgcgtatcgacatcaacacgaagcgtccgatcattcacaacaacacaggtggcttctccggcccggcgcttttgcccattgcggtgcgcatggtgtggcagacgtatcagaaggtgaaaattccgatcgtcggtctcggcggcatcagcacgtggcaggacgccgtggaaatgctgcttgcaggtgcgacggcgctgcagatcggcaccgtgttgttcacagacccgtatgcgcccgtgaagattaccgaagggcttacaaattacatggataaaaacggcgtgaagaccctttccgaattgaccggtgcgatgcgtccgtggtaaatgatatggaaaaattgcacttatatcttgtgcgccactgcgaaagcctcggcaaccgcgagaatatttttcagggtcagcttgacctcgatatcagcgctacaggagaaaagcagttggcgcttttggcgctgcggtttcggaacatccccatcgatgctgtatattcgagcccgttaaagcgcgcgtataaaacggcggaagcggtagatttataccacagtttgcccatcatagaactgccggagctgatggaagtggatgttggcgcgctgtccggcatgaagcttgacaaagcgtttacggattatccggtatttgccgaaaagtggcagaattccccgcaaaactgcatttttccggagggagagacgacagcggaagtctatgaccgcgcaaaaaaagcgcttgcacgcgtgaaagcgaattgcatgggcaaaacagcggtcatcacgtcgcacggttttttgttgcgctgcatggcgtgtgagattttgaagcacgatattgaacgtttgagtgatattcgtatcggcggcaacacctcggtttcggaattttatatcggcaaagacggcagcgtggaaacggtgcgcctcagcgataaaagccacttgccgaaggaattgctcggcgacccgaaccagtatgttgtccacaaataatatatagcaaaagacataagaaaagcccctgaagcataccattctctaaagggggagtgggtatgctttgggggcttttggagtatttatcgtcgattttgtttttctttctgcacatcacaagcgccgggtcgtttccaaaggcgctgactgcggcggaggagaaaaaatatctggagcaaatggcggcgggcgaccaccacgcgcggcaaaaactcatcgaacacaatttacggcttgtggcgcacattgcgaagaaatactatgccgatgaaaatgaccgcgatgacctcgtttccattggcacggtggggctcatcaaggctgtggacagcttcgacccgacaaagggcattcggctttcaagctacgcttcgcggtgcattgaaaatgagattctgatgttcttccgcagcgcgaaaaagacggcgcaggacgtatcgctgaatgaccccatcgataccgacaaggacggcaacacgctgacgctgctcgacaccatcgcgacggacgaccacattttggaggacatcgacctgcgcatgaaggtgcggcagttgtacgacgcggtgaagacccgtctttcgccgcgcgagcgcgagatcattttgctgcgctacgggcttacgggccagcggccgctcgtgcagagagaaatcgcaaaaaagctgaacatttcccgcagctatgtctcgcgccttgagaaaaaagcgctgcaaaaactgcgaaaagcgtttgacgaataaaaaaggcgcgtgcatcacacgaagttgtgggtacacgcgcttggtttaaataaattttccggtcacgctgtccgcggcgtttttgatctgttccggagttccgcaggcgacaagccgaccgcccgcttcaccgccgccggggcccatatcgagaatataatcagcgctgcggatgacgtcgaggtcgtgctcaataacgatgacggtcgcgccgctttcgatgagcgtttggaacacggtgagcagtgtctgcacgtcgagcgggtgtaggccgatggtcggctcgtcgaacacgaacacggagccgctttgtgccttgcccatctcactcgcaagctttaagcgctgcgcttcgccgcccgaaagtccgggcgtttcctcaccgagcgtgaggtagccgaggccgagactgtttaagacatttaatctctgcgagacgagcttccagtccttgcaggccgaaagcgccgtgcgcacgtccatgtccatgatttcgggcagggtgtacgcttcgccgcttttcgtcacgcagcggatcttcgatgcgtctttgccgtaacggctgccgcggcagtccgggcaggggatattcacatcgggcaaaaactgcacgtccaggctgatactgccggtaccgtcgcaggtggggcagcgcagcttgccggtgttgtaggagaagtcgccggctttgtatttgctttttttggcgtccggtgtgcgggcgaaaattttacgcagctcatcgtgcacattggcgtatgtcgcaacggtggagcgcacgttgataccgataggcgtagcgtcgatgagcttcacttggtcgatgccctcggcgctgaccgacttcacgtgcgctggtagcttttcaccacgaatatgcgccgaaagcgccgggataaggctttccagaatgagcgtcgttttgccggagccggaaacgcccgtaacaacggtcaggcggcctttcggaatatccacttcgagcggcttcaccgtatggatgcggtcggtggaaaggtggatagcgccgttttggaaaagctcgctttcgggtgctttctgtcgcgagatgccctgctttcccgccaaaaacgggccaatctgcgagttttcgtttatcttaatgtcgtctgttgtgccctccgcgatgacatggccgccttttgcaccggcttccgggcccatttcaatgagccaatcggcctcgctcaaaatctgcgtgtcatggtcgacgagcagaacggagttgccgtcgtcgatgagatcgtgcatcacgccggtgaggccgacgatgttcgccgggtgcaagccgatggaaggctcatcgagcacatataagacgccggtggtgcggttgcgcacggcacgggcaagctgcatgcgctggcgctcgcctgtggaaagcgtggaggcagcgcggtcgagcgttaggtagccgagccctaactccaaaaggcgcttggcattcaatgtaaacgaatcgcagatgctctgcgccatgggacgcatttcttcgggcagcgaacccggcacgtccgcgacccaatcggtgaggccggcgagcgtcatacggcagacttcatctaaagagatgccgcgaagcttcggagcgcgagctttctccgatagccgtgagccgccgcagtccgggcacggttcggtcttgagaaacttttccacgcgcttcatgccgttttcatccttgactttggaaagtgcgttttccacggtatacacggcgttgaagtaggtgaaatccatttcgcctgctgcgccgctcgttttattctggtaaatcatgtgctttttaatggcagggccgtgaaacacgatgtccttttctttttccgtcagctcgcggaacggcacgtcggtgcgcacgccgaggtcgcgggcgatgtccttcatcaaagaccacatcagcgtctgccacgggcgcacggcgccttcgtcaatcgtgagggtgtcgtccggtacaagggtgctttcgtccacaatgcgcacgatgccggtgccgtcacatttgcggcacgcgccttggctgttgaacgcgagttcctccgcggacggcgcgaaaaattccgcaccgcaaacggggcacacgcacggctgacccgccgcgacggccaatgtcggctgaatgtagtgcccgttcgggcagcggtggcttgcaaggcgcgagtacatcaggcgcaggctgttgagtaactccgtgcccgtgccgaatgtgctgcggatgcccgggacattggggcgctggtgcagtgcgagcgcggccgggacatatagaacttcgtccacctgcgcctgtgccgcctgcgtcatacggcggcgcgtgtaggtggaaagcgactccaaataccgccgtgagccctctgcatacaaaacaccgagcgcgagcgacgatttgccggagcccgaaacacccgctacgccaacgatcttatgcagcggcacatggacgtcaatgtttttgagattgtgcacgcgcgcaccgcgcacctcgatgtggtcgacaagattgaatttgtgctttgcttgttccatttattcttcctccgctttgcggttgatctcttccagaaaggccttgccgtagcgatgcgccttgcgctcgcccacgccggagacctgcaaaagttcctgttcgtccgtcggcattttggcgcacatatcgcgcaaagtggcgtcggtgaaaacgacgtaggccggcacgctcgcttttgcggcaagcgcggcacgcagctttttcagccgtgtgaaaagctccgggtcggcatcgcctgcggccttgtccggcttcttcgctttttcctgcggcacgggaatacgcatttcaaagcttttttccccgagcaaaaccggccgcgcgttctgcgtcagctttaaaaccgggtattgcccgtcggtctggatgagcaattcctgcatcaaaagtgcgtcgatgatacgcttgatttcaaaaatcggcttttcgcgcatgagcccgtaggtggactgtgtttgcagattcatttgcaaaacacgttcattttcgctgccgcgcagaatgtcgcagatcatgctgatgcccagccgctgcccggtgcgcgccacgcaggagagcacctgctgtgcttccacggtggcctctaccaaaacggagccgcccgcgcagttggagcaattgccgcagtattcctcggcgggctcgccgaagtattttaagatgaatgcgcgcaggcaatcggccgtcgtgcagtaatatgtcatttttcgcagacggtcgtattcgcgctggataagcttttcctgcgtttcaaaatcgaggtcggggttcgggtcgctgttttcgattaaatagcggttcgtgcgcacatcttgcgggctgtaaagcaaaatacactcggcggggctgccgtcgcgcccggcacgcccggcttcctgataataactctcgaggtttttcggcatgttgtagtggatgacgaacgacacgttagatttatcgatgcccatgccgaacgcgtttgtcgcgaccataatgggcttgcggtcatagacgaaatcgtcctgattccgcctgcgttcttcctccggcagaccggcgtggtagcgcgtggaagggatgcccttgtcgtttaaaagcgcgtccacttcttccacggtgcggcgcgtggagcagtacacaatgccgcatttgcccgggcgttcttcaatgagcttcaaaagcgccagcgccttactgtgcggcatctgcacgccgaaatataagttcgggcggtcaaagcccgtcgtgatacgcacggggtcaatgaggtgcaggtgctccgcaatgtccttgcgcacggcttttgttgccgtggcggtgaatgcgccgatcgtcgggcgatttttcaaactttcggcaaattccgcaatctttaaatagtccgggcggaagtcctgcccccactgagagacgcagtgcgcttcatccacggcgatgagagaaatattgaggttctctacggccgtgcggaaattctcggtcgaaaggcgttccggcgcgacgtagacgagcttatacagcccctcggataaattgtgcagtgcgcggctgtactgtgccggggtgagcgagctgttgaggtatgccgcgtgcacgcccgcctgcgtcagcgattctacctgatctttcatcagcgaaatgagcggggagatgacaagcgtgatgcccggcagcaggagtgccggcacctgatagcacacggatttgcctgcgcccgtcggcatgacgcacagcgcatcgcggcccgtgagcagtgcgtctacaatttcctcctgaccgcggcgaaaggacgtgtaaccgaaatagcgccgcagaatatcgagtttcgtttccatagatctgttcctttacggtcaaaaatacccgcgcgtgcaaaagcacggcgggcatttaacgttttaaattaagagagcttcttcatttcgatggtcttccagtcgcactccttgtccatccagcggatgccgacgtctgcgtattcggcttcgccgcgctggttgtcgaatgggtcgatgcgcagctgtgtctttggcgggtcaaaatccgcctgaagctcgctgtttgccgccatgcggaacgggtcgagattgccgaagtagaagtcgttgcgctcgctgtcgcccatgcggtgcgcactgccgccgaaggacgggtctgcaaacagccagccgtagggagcaatgtagaactgcgcccagtcgtggcagccggtgtcgtccggcgtgacgaacaggccgctctgccaacgggcaggaatacctgcgcagcggcacagcgtgatgaacagcagcgcctgcacgccgcagtctccgtgcagccccgcgccgtaataatccggaatgctgcccggcagcgcgaagtattcgcgcacatacgaatatgtaccgaccttcgtgcagtagtcgtaaaatctgcgtgcgagcagaagcgggttcttctcatcgccggaaagctctttgcaaagcgcacggatgagcggcgtgaagcgaatgtgcgggtaaagctcctcggtgtcgaacgtcggctgctctgcactgacctgtgcggattcgagattgttgtatttcacataggaaagatatttgtattcgacccagaaggtttcgtttttctcgaatttgccgcggaacgagaccgtgcgcgcgggtgcattttcatctgcaagcttataaatggggtgggaggtcgcaaggatctcaatgtcgcgcatgttcatcgcgttcttcggtacgggaagatgcacggtcagttcttcgccggggcggaaaacatcgtcatgcagacggaactgggcgcgcagctgaatgctccacagcgcatcgccgtcttttttcatgtcgcgtacattttggcgcagaaattccacgcgatcacttttgtctttcggcggcttgcctgcacgcgtggcgatatccgggtaaacgcccaaaagcgtatcgtagaacgtgcgggaatacgtcgttttgccgttgatgtagatccagtcgatggcaccgcggtcacgcaatgcgtcaagctctgccttcgtgaaatccggaatttccttctgcacgagcgccaaagcgtcttcttcgctgtatgtgtagcccgtcggcagtgctttcaagacctcacgctccagcgcaaggcgtgttttcataaatgccgggactttctcgtttgcaaggtataggtcgataaggtggaacgcgcggtcaaaatcgccgcaccattttgcctttaaaatgtcttccggcagcgcgattgcaagcgtttcaatatctttttggttcataacagcagcctcctttgatggataaagttaaccgatatgcagcaccgcgcacgcaatgcggaaatagatcagcaaggaaagcgcgtctacaatggtcgtgatgaacggactggccatgacggccgggtcaaaaccgatgcgctttgcaagcaccggcagcgaacagccgacaagctttgcagcgagcaccgttacaacaagcgtgctgcacacaacgatggcgaccgggatggtcacacgatcaatgagcagcaatttgacaaagtttgcggcggcaagcgaaacaccgcacaaaaaagccacgcgcgcctccttccagaggatacgcccgatgtctttatattcgatctcgccgagggaaagaccgcggatgatggagaccgaagcctgactgcccgcgttgccgcccgtgtccatcagcatggggataaaccccgtcagcacaatggaagcggaaagcgcatcttcaaacgaggtgatgatgctgcccgtaaatgtagcggagatcatgaggagcaaaagccacgggatacgttttttccatgtggcaaaaacgcccgtcttcatgtacggcttatcggtcggcgtgatagccgccatcatttcgatatcttccgttgcctcatcctgaataacatcgatcgcgtcgtcaacggtgacaatgcccacaaggcgctcttcgttatcgacgaccggcacggcaagaaaatcgtactttccgaacagggaggccacttcttctttatcggtatgggtggaaacgtaaataatgttcgtttccatgatattgcgaatcagctcgtttttcggggcaagcagcaggtctttcacggtcacaatgcctttcagcttgcggcggctgtccgtgacatagcaggtgtacaccgtctctttttccacgccgatggcacgaatgcggtcaaacgcctcctccaccgtcatgccgcgcttcaaatcgacgtattccatcgtcatgatggagcctgcgctgtctttggggtaatttaaaatctggttgatgagtacgcgcgtttcggcgtccgtgtgtcgcagaatgcgcttgacgaggtttgcaggcatttcttcaatcatgtctgcagcgtcgtccacatacagctcattcacgacgtcgtgcagctctttatcactgaatgcttcaacaagcaccgtctgttcgtccgggttcatataagcgaacgcgtccgctgcaagctcttttggaagcaggcgaaacacaagcgccatcttttcacgcggcaggtcttcaaaaagttctgccacgtctgccgggttcatgtctttcagaagattgcccaactgggggaaatctttattctccagcagctctaaaattttgtccaacgtatccaacatagttcgtccgtcctttctctgcaatcgtgcaaaaatcggcaatcggacgatacggtttgaactcagccgtttacaaatgtaaggtcacataaaaaacaagcggagaaaatcgcctgtttttctgcgggcggctgcatccgttctcgaggaaccgcaccgccactactgccagcgtccattttctccactcctttgtttttattctgagttgcttttaggggagttaaacgcagtttgagtggcgtttaaatgtgttttaagcgctcataatgtattccaaatcgtgacagttgagatttaggcagagttatagaacgctattaccccttttaacactcttatttataaagttaccctttttttgaataattgtcaagcctaacaaacgacttttcgggaattttacgtcagagatttcgtttggggtttgccgtctgccgcaagagataatcaatgctcacgttatagaagtttgcgagtttaattagaatgtcgtccgtaagctgctgctggcctgtttcgatataactgtatttgcgctgtgtaatgccgattgcatctgcgacttgctgctgcgtcaaatcggagtcctcccgcagatcgcgtattctgttttccgtcaattttttcacctgctttgagtggtatccactcaaagtatatgtagacggattttatctattgacttttagatatatttcatctaaaattgggaaaagaggagagacaggagagaaaatcaatgcttaaacgctggggacgagtaatttttgctatgctgttggtatgctttcttctgacgacctgcacctgtgcgcataaatggaaggaagccacctgcaccgagccgaaaacctgtgtatattgcggtatgacggaaggcgagccgcttgggcatgattggaaagctgctacgatcaactaccccaagacctgtgttcgctgcggtaaaacagaaggtgaagcttacggtatctattaaaaaaccgatgcagagtttcgactgcatcggttttttgttggctttaatttatcgctccatattggagttgcgctttgtgatggcttcccacaggccatttaagtacgcggcgccgagggcacggtcgtaaaggccgtagccggcgcggccggtctcgccccagatcattctgccgtggtccgggcggatgtaaccgttgaaaccgtttttgtagagcgcgttcaaaatggcatacatatcgagcgagccgcatgcggagtagtgtgcgcgctcctcaaaaccgttttccagcacggcgacgttgcgggcgtgaacgaaatggatgcggcccatcgcggcgtattttgccgccatgtgcaccacatcgttttcggcgctgcatccgagcgagccggtacacagcgtgatgccgttgtgcgggtcatcgacgattttcaggaagcggtcgagattcctttcgcacgtgataatgcgtggcagtccgaaaatgctccagcacgggtcgtcctcatggatggccatgttcacgtcacattccgcagcgacgggaatgatgcgctcaagaaaataagtgaggtttgcccaaaggtcttcctcggtcattttgttgtattccgccacgacggccctcagctcctcgcgcgtgtagcttgcgtcccagccgggcagcgtgaggtcgctgtcgcttttcagcgggtccacggcatccacctgctctttatagtagacaaggcttgtagagccgtccggcaggcggtggtcaagctgcgtgcgcgtccagtcaaacaccggcatgaaattgtagcagatgcagcggatgccggcctcggcaaggcggcggatattctcgcagtaattctcgatatagcggtcgcgcgtgggtttgccgagtttgatgtcctcgtgcaccggcacactttcaatgacctcaaattgcaggccgttatcctccgtttgttttttcagcgcagcaatgctcttgcggctccaaacttcaccgacgggcacgtcgtatacagcggtgacgatggcctgcatgttcggaatctgacgaatattttggagggtcacggggtcgtccgggccataccagcgaaatgacattttcatagatataatcaacctttccggtgtattcacgtgttattcaggttcatcgtagcacatcgggtgaaaaaactcaaggggctaaattccttttgcaccgatttccaaacaaacgtgggatttatacacagttttgcgcaggtggtctttgtatctttcgccgaaatcgcggacaagatgaaaaaatctataaaaacatcttgaaacttacgtgtcttttagtataataaggtgtatagcgcgtagtttagagagcgcagataggttatttacttaaaatcgagaggagtccaatgtattatgtctaaagtagtaagagtagcagtcgtgggctatggcggcatgggcggctggcacacgaagagattacaggaaatcccgggtgttgtagagcttgcaggcgtatacgatattaagccggagcgcaacaaggctgctgaggaaaacggtattcacgcatacagctcttttgaggagttgcttgccgacaagaccgttgatgttgtaacggtcgcaatcccgaacgatcagcacaagaaggtttgcattcaggttatggaagcgggcaaggttgccatcagcgagaagccggtcacgctttgcaccgctgatctcgaagagatgatcgcagcctccaagcgcacgggctccgtcttcacggttcatcagaaccgccgttgggacgaggatttccgcgttgcggagaagattgcaaagtccggccagctcggtcgtgttttcgccattcagtcccgtgttcacggttcccgcggtatcccgggcgactggagaaacacgaaggcacagggcggcggcatggttcttgactggggcgtgcacctccttgaccagatgaacatgatgatgggcaaaatgccggtttccgtttacgcaacgctgtccaacgtaacgaacgaagaagtggacgacggcttcaccgctacgttcaagtttgataacgatctcgtgttcaccgtagaagtcggcacgagcaacttcatcaacctgccgcgttggtatgtcgaaggtctgaacggcacggctgtcatcgatgacttccaggtcaacggcaagatcgtcatcgcaacggcggacgaagagcacgatgcagtgccgatcgtcaccgcagcaggcctcacgaagaccatggcgccgagaacgccggaaacgatcagcgagcttccgctgccgagaatcgactgcgacattcacgattattatcgcaacatcgcagcagttgtcaacggcgaagcagagcagatcgtcacgcacgaccagcagcgccagctgatgaagctgatggaagcaatctttgagagcgcagagaagaatcaggtcgtttacttctaatttaaattaagatgaattgagaacagctccgggcgaaaagctcggagctgtttttgcgtattataagctcagtttattcgtcaaacacgaattcatcttcgccgaagcgttccggatgatatttcatgctgtctgcttccgtaatggtgcgctgtacacggcaagggttgccgacggccacgctgtttgacggaatgtccttcgttaccacgctgcctgcaccgatgacacagttatcgccgatggtcacgcccgggcatacgacgacgtttgcgccgaaccagcaatcgttgccgatggtgacgggttttgcgtagcaaacgcgaatttcacggccgtcctttgttttcagcacgcggcgttcctctgcgatgatcgggtgcatcggcgtgacgatagtcacgttcgggccgaagttgcagcggtcaccgatggtcacgggcgcgtcatcctgaatggtcaggttgaagttgccgaaaaagctcttgccgatgtgcgtgtgcgtgccatagtggatctggatcggcccctgcacaaacgagccctcgccgaaatcgccgaagatctggtgcacgattgcattacgcttttcggtttcgtcttcgagcgttgcattataggcgctgcaaaggttgtggcagcgcagcttgatggctttcaagtccgggtgaccggggcagaaaaactgcccggcaaagattttttcttcctctttcatatgaattcctcccaaaatgtttatcgtaacggcctttgttgtttattgtggtttatcgagcacgagcacgccgtaaggctccatggtatacgtgccgtcgagcgtttcgcgtgtaagcagctccttcgtcggcttttgcacggtgacggtttgcggctgtgcggtgtagttcagcaaaaacgcgtagctgcggccgtttttctcgtttgtacgcaccgtgagctcgatctcctcgggcagctccagccagcccgttacagggcaaagctctgctttcggcagcagctccaagagcgccgcagcggtctcctccgcaaaaacggagccacaggcgtagaccgtgcctttgccgacggtgtttttggtcagcgcgggtttgccgttgtaatagttaccgtcatacgtcgccagcacctcgcagctttcaaaatccgggcgcagaatatcgttaaacgtcggcgcggggattttcttttcgccgagcgtcatgtattccttttcgtccgccgggccgatgaacgtgaaatcctccacggtgcagccggtcagcggcgctaagagccccggcatcggcatcatggggcactgcccgtcaatatctttatagccggagcggcagccgaagaaaagagtgccgccgttttcggcgtaagcgcgtaatatttccgcgcgggcgggcgtcatgatggttgggtgcgggtacacagcagccgtgaagttcccgagcggctgggacgtgccctcgtcgttgatgttgacgaactcgaacgggatgtgcgcgcgctgcaaggctttgaaccacccgtcggtgctctcccggtttaagggtccgtgccatttgtcctccatgccgtcccactcattgtcgtagtcgcagaggattgcgaactttgccgtatgctttgtgcctgcgatgcgctgaatcttctgaatatcctcgcttacgcgcaaaagctcttccgtgcggcggttcgggaaattatcatagttcaataatccgtgccagtacatttctgtgccgaatgtgcaggtacgccagcggaagtagctgacaaaatctgcaccgtgcgcgatggactggaaagtccacagccttaactgacccggcttcggcgcgggctgcagaaggcgggtgttccaaccgccggggccggattgctgctccatgatgccgaagcggtttgagacgcttcgcgtttttgcaaggttaaatgatgtttcgcggtcgcgcagggagcgtggagagagcttgttgccctccatcgcaaacgcgaagttcgggtagctgtcatacgtcataaagtcgagcttttccttgacaagtttgtggttatcgagcacgccgaaaagtccgtttgtcgtgataaattgctccgaacggcgatatttccggataatatccgcctgtatgccgatgtagtttatggccgcttcggaaatgaaacgcttttcctccagcatcatgtgcggattgttggagtttgcgagcgtgtagcgcgaaaggtgaacctgctcccagtccgtgtaggtctggttccaaaatgtcgtgcccatggcgcggttcaggttttcgagcgtgccgtatttctctttaaggtactttctgaacgcctcgtggtcgctcggcgcgtggtagctgtttgtttcgcagttgacttcattgtcgatctgccagccgatgattgcagggtgtgcgctgtaatgcgccgcaatgtgctcaacgatcttctttacaaagtcgaggtacacgggggatgtcatgttgtggtgcttgcgcataccgtggtagactgggtggccgtaaatatcacagtttaatacttccgggtatttttccgtcagccaggcgggcggggtcgcggtgggcgtgcagaagatgacctgcatcccgcagtcctttgccacatttaaaaagcggtcccaaaagctgtcgtcaaagcgcccttcctccggctcaaagaggttccacgcgaattccgccacgcggatgacaccgatgccgtaggatttcatacgcagcatatcctctttccagaacgaagtatcccagtgctccgggtagtagcatacgccgagctctatcgtgttgccgtttaacatagtatatgctcctttatctgtgctcgccgatgaagaacagcgctacggtgccggggccggagtgtgcgccgatgacaggaccgatgaagttgatataaatgtttttcacaccgaatttttcgcgcacgcggtttgcgacgtattcggcgtctgccaggcaatcgccgtggctgatgaacacggtctggtctgcgggctgaatggcggtctcttccattttctgcacaagcgcatcaagggactgccgtctgccgcgcaccttgctgaccgggatgaggtggccctcgtcatccacatgcaaaacaggttttacgccgagcaaagtgccgacgagcgctgctgtggcggaaacgcggccgccgcgctttaagtggttgaggtcgtccaccgtgaaccagtggcagagcttcaaaacgttttcaccgagccacttatacagcgaatcaatgtccgtgccggcacgcttcagcatggctgcatggtatacgagcaaaccttcgccgagggacgcgcagagcgaatcgaacacataaattttgcgctcgggatatttttctttcaattcatcgcgcgcgatgaaggcgctttggcaggtgccggataaaccgctggaaaacgcaatgtacagaacgtcttcgccgccttgcagaacaggctcaaagacccgtgtgaattcgtcggcgttgatctgcgatgtggtggacattttgccctcgcgcagctttgcgtagaaagtttccgtcggcatatccgaaagatctgccttgtctttatatgttttaccgtcgattgtaaagcggagcggcaccactgtgaggcctaactcttcgatcattttatgatccatatcgatggtggaatcggtgatgattttgtaacccatagttatctttcctttccgtgccttaaaaacgcatttctgcgcagcacatcgttattatagcacaggcgaagcgaatttgtctatgcgttttttgtgtaaattaccctttgcggtttcgccgataatcgagataatcctgcaaaatgatcgtcgccgccacggcgtccacggttgctttgcggcgcttaccgcgcgtatttgtttcgtttaaaaagccgtgtgccgtgatagtcgtgccgcgttcgtcggagaaatcaacgggcagcccggtcttttccgcaagctccgcaccgaaagcgcgcgcgttctgcgcgctttcgccctcgctgccatccatgttgcgcggcagaccgacaacgatctgctcggcgcggcgcgctttggcaagctgcgctacacgctccaaaaggcgctcgcggttgtgctcgttcacgacctctacggggcttgcgagcagctcgcttttatcgcatacggcaacgcccgtacgcgctttgccgaggtctacacctaatataaccatgttctgtttcctttcaatgttttgcttttcttcagtataacacggtttttaaaaatagaaaagcacctgcttttgcgatttcaaagagcaggtgcaaaatctgtatgtttttattatcgcacattcgtcacagtgccgacggcgacgtagttgtcgcacactgcgccaaggtcggtgccttcgctgccgtgccagtttctgccgggcacgaccgtgtattccaccgtgccgtccccgagtgttttgcaggtgaagctgtccatgtaaaaatcatcctgcgaaacggcgcagccgtgctttacacccttgcagtcttccggtgcgcagccgggaaaattgatgttccaaactgtgttttgcggcagaggtttatccatatattcaccgatgagcgcacgcaagtagcggtcggtcacgggatgataatcgaggttggcctgggaaagcgcgatggcgtggattccccagaaagcggcctccagcgcagcgcccgccgtgccggaatactgaatatcgccggaaatattgtagccgctattgatgccggaaagcacaacgtcaggcttgcgaccgagcagatggatgcccacgcgcacacagtccaccggtacgccgctgcattcgtatgcctttacgccgtccatgtaacccggacgctcgcgcacgtaaagcggctctaaatacgttacgctgtgcgatttgccgctgcgctggctttccggcgcgacaacatatacctcgccgaatgcttttgctgtctctgccagctggcgaatgccgcctgcgtcaatgccatcgtcattcgtaattaagatcaatctgcccatggttgctcctccgtcatgcaaaaacttttcgcttgaagtataccatatctatttcgacaagtccagacggagattcaaaattccgctttgtcacatctgcttataattattaaaattttgaaaattatatagaaatatagcacgattttcttgcaaaagaagcaaattgcggtataatgttcttaatagaacaaaaaggctgcggttcggttgcagccgaggagaagttgtaaaaggacaagcgtgttattcgtttgcccgaagaaaggaatcttgcttatgttgaatcttattcccgcgccgcgtggatcggtgcacatgcaggagggcagtgtaaagctgccggagaccgtcaccgtttcgctcggtgattttgcaccgtggtgccttgaggcatttgctgcaagactggacggccacgtggagatcgccgaaaacgggtttatcgcgctgaaaaaggccgatatcgcaaaagagggctacaagctgaccgtcacaaaggacggcatcaccgtggaagcggcggacgaaagcggcgccgtgtgggcgctgacgactgtcacggagctcacagcagagggcgaagcgctgccaatcgtcaccattgaagacgcaccgcactacggtcatcgcggcctgtcgcttgactgctcccgtcatttctttacggcggacgaagtgaaaaaggtcatcgaccagatgacgcgtgtgaagctgaatgttctgcactggcatcttgtagatgaccagggctggcgcatcgagtgcaaaacgctgccgctgctgcacgaaacgaccggcacgtattacacgcaggaggagatcaggagcgttatcgaatatgcccgcgtgcgcggcatggagatcatcccggaaatcgatatgccgggccacaccagatcgatgattgcggcatacccgcatttgagctgctttggcgaaaaaacggagctgtgccagtttggcggcatttttgagaaaattctctgccccggtaaggacgaaacattcgagtttatcgaaaagcttctgacagaagtctgcgcactgttcccggacgaccgcttccacatcggcggtgacgaagcgccgaagaccgaatggaaaaaatgcccgcactgcaaggcgcgcatggaagcgcttggccttaccgattatgaagatctgcagggctacttcacgaagcgtgtcgtcgctatcctcaaaaagcacggcaagcgcgccgtctgctggaacgatgttctggaatccaaagatgtcgataccggaaacatcatacagtattggacggcgcagcatgaagcgccggtgccggcatttattgagcgtggcggcaaggtgattttctccaatatgtccgctttgtatttcgattatccgcatggcatcaattcattgaataaggtctaccattatcagccggtcgtcatgggcaagagctacgcagacagtccgaatatgctcggttacgaagcggcattgtggtcggagcaggtggaaacgccggaacacctcgaagaattgctgttcccgcgcctgtatgccgtatccgaaatcgcgtggaacgaagcgggggattacgcagattttgaacaccgcgcggaaaagaaaattgaaattgccgcaaagcaaggcgtgaactgtatgacaaaagacgggtggaaccccgagggtgaagcgcgcgtgcagagtgccgcgacattcattgcacacatgatgaacccgggcggcatcggcacaccgcatacggatgcggaaagaaaaatggtgcgtcccgtcatagagaagtttgcgcagatttggttccggccgcaggatgttcccgaaatgatgaaaaacgacgacctcgtcggcgcagcacttaacttcatgaaaatgtttccaccggaaaacgatgagaccaaaggagaataaatagaaactaagaaaacggctttgcgggtaaaatgcagagccgttttgcatcttgttttcggaaagcaagcaaacggggttttgaaagcttttcaataggcttgttcacaatttgtttacaaaataataataaaaatgataattattactatttacaaatcgaaaaaagcgtgctataatagtaccaacaagtgagagagaaagaaatcccacaaacctaaaggaggtgaagccgatgccggaaaagttcagccgaaagcgtgaggcgctctacaacgcactgcgtgccacaacggtgcacccaactgcggagtggctctacgctgcgctgcggccagaatatcccgatttaagtctcggcacagtttaccgcaatcttaaaaaattctgtgcagagggcaaagcgagaagcgtcggcgtcatcaacgggcaggagcatttcgacggcgatacttcggcacacagccatttcgtctgcgattgctgcgggcgcgtgctcgatatctttgaaccgcttgtggacacagaaacactcgagcgcatggaagcggaacacgggtttacaatcacaaaagaagacctgctgttcggcggtgtgtgcgccgaatgcaaagaaaaaagcaaaaataaaacggcttaaaagccgcaaactaaaatcaattttaggaggatcttattatggcaaagtttgtatgcaccgtatgtggttacgtttttgaaggcgaagcagctccggagttctgccccgtatgtaaggcaccggcttccaagttcacgaagcaggaagagaacatgacttgggcggctgagcacgttgtcggcgtcgcacagggcgtcagcgaggatatccttgcggatctccgcgcaaacttccagggcgagtgcagcgaggtcggcatgtacctcgcaatggcaagagttgcacaccgcgagggctacccggaaatcggcctttactgggagaaggctgcttacgaagaagcagagcacgctgcaaagttcgcagagttgctcggcgaagttgtaacggacagcacgaagaagaaccttgagatgcgcgttgaagccgagaacggtgcaaccgccggtaagttcgaccttgcaaagcgcgcaaaggccgcaaacctcgacgccatccacgacaccgttcacgaaatggcccgcgacgaagcccgccacggcaaggccttcgcaggtctccttaagagatatttcggtgacaagtaataggagtgtgtcttatgaaatatgagtgtccctgcggttatgtctatgaccccgcactcggcgatccggaaaacggcgttgcacccggcacggcatgggaagatgtccccgaagattgggtttgccccacctgcggtctcggaaaagatgctttttaccccgctgaataactaaaaaagaagaggagagggatttgatccttctcctctttttacttatgtatatgtgatatgcgatttggtttatttgttggctataaagacaatgtcgttcccattccaataatccggagtatatcgaatttctaattctttccaatcttcgggtacttcatatccaactacacctttgaactttttgccagctgcgacagttccatctaactggtttttatcgcctttttcgagcagcgcagaaaagatgccagagcaagtataatcatcacaataggcttcgaagctgagcatagaagatacagcgatttctgtgtcagaattattgcagatttcgaattcacaaagaacaaatacatttccttcatttggctgattgtattcagagccagtgctttctgtaacatcaatgagcgtggtttgaactttgtccagttcggcggtttcaccaatgtagaattctgttttcgcttctttcgcttcgctggattcatcatgcgcgagggattcggagaatacaccctcagctttagataccaactgcggtgtgctggaaatttcgttgcatccggaaagcgctgtaataaacagcgtagaaaggataattacaataccaaaagttcttttcatgttctgtccctctttttcagtgtttattgttcttctttttgcagggtaatctcaatgtagtgcatattgtctatataccgcacatcaatctcataaccatttgcatttgttcctgtataagaataatcaaggtcttcattcgggtatttgttttgaaaacccatttgttcgcaggagtcaatatattctaaaaagtcatcgtgagacatatcatatgcttttacacccaagcaatcttcttcgaactgatcagcagaggcaatgcgggtatttggctttggaatcattttagtataatcgttatcgacccaaacatagagttcttctgtgttttctgaaagggcatatccacaattttcagctgaataggagactgtgtgtattttgccgtcttctccgataaaatgaatatttgcagacgaaaattccatcaaatcacattgatctgtgctggtcggataagtgttataatcgatgtaacaatctgcgccctcagctgtttcaccaggatcactaacaatccaatcatatacataaggctccatatctggaattttgtcattaggaataagttcatccgtaaatgggtcaataagttgcaattgtttggaggtaacgccttctttcattttgaaatataactcaagcataacaatggtgtaatctgaattatttgtataatcaaatacagctacgggttcatcgtattcaacagtgtttctgaaactccagacgagttcttcgattttcgggtaaccgttttcatgagcctcttcatctgtcgggttagatacttcttcgcttgcagcagaacttgttatggttgatacagagctttcagattttgaagctggagcagtgttgccgcacgcacacagcaatgccgcgagcagcactgccaaaatagcagataaggtttttttcataaatattacctctcaaaatattttattgtaatacaaataaatatcatattacgaatctaattgtaacatactataattcgtctgtcaatctataattagtatagattgtgaggtggaatttgtgaaaaatgaacctttgaagataaaaaagcgcggagaggacgggaatagaatcatttccgtgcgtattcgggaagatattttgcaaagtcttgataaaatcgcgagcgaaagcaactattcgcgcaatgagcttatcaacgtgatacttgaatacggcatcaagaatatagagattgaataatacagaacccccgaaggaagaccggataaatctcccttcgggggttctgctaaaagtccacgaaaatttcagcgccgaaaacggaagtttcacggcgctgctgcgggaatattcgtattttcgtgcgtgctttaccgcatgtgcacgtccatctgcgggaacggaatctccatgccggcttcatccagcgcctttttcacgttttcgttgaggtcaaaatagaggtcccagtaattttccggggcgcaccaaacgcgcaggacgaaatcgagcgagctcgcgctctgcgttttcatgcgcgccagcggggcggggtctttcagcgatttcgggtcgctttcggcaacggaaagcaaaatttgcttcaccttgtcaatgtcacaatcgtaggagacggagaatgtcagctctacacggcgctgtcccaccgcgctgtaattcgtgatggcggcgttcgtcagcgagccgttcggcacggtcacgcgcttgttgtccggcgtcagcaccacggtgtataaaacgctgatggcattcaccgtgccggcgatttccgtcgtttcaatgtaatcgcccacgcggaacgggtgaaaaagcaaaatcatcacgccgcccgcaaggttcgtcacggcgccctgaaacgcaaggccgatggcaacgccgcccgaggtgaacagtgcgaggaacgaggcggtctcgatgccaagaacgccgaagcacatcaaaatgaggatgatatacagcacgatgcggctgccgctcgccatgaacgaagcgagccccgggtccattttttgatatagttttgagcgcttgaagcggttcatcaaaaatttgatgagcttgctgccgataaacaaaagcagcccggcggcggctaagcgaatgagaaagtaaaacgcctgttcgccgacgtttttcagccatttttcaagctcgttcacggtggggatgttctcaagcgggtcggtgacaaccgtgtcaaacagcgttaaaaatcgcgtcataggcacaccgtcactttccgatgcgttccgtgtcgatgatgatgttcacggggccgtcgttttccacacttacgtgcatgtgtgcgccgaattcacccgtgcatactttgccgataggctggtttttcacctgttccacaaagtagttatataatctcaaagcttcactcggggaagcggaacggctgaaatccgggcggcggccgtgcttcatatcggcgctcagcgtgatgttcgagacaatgagaatatcgcccttgatgtcttcgagtgagcggttcatcttgtcgttttcgtccttaaatacgcgcaggccgcacaccttctgcacgagaaaatccgcctgcgcgtccgtgtcaccctctatggcgcagatgaagacaacgaggccctcgccgactttgcgggtctcgccgccgtttatggtgatctctgcaccgtttatacgctgaataactgctctcatattgtaaattcctttccggttggtggattttgaccgataaaacgggagatttcttcggtgttttctcaattatagcaggctttcgctcttgcttcaagcggttttgtttgttataatactgttgattgaaaatcaggttatgtgcatgcaaaaagacagggcgcaaaagcgccgcgatttgaaaggacgaattatgctgatccacataaaaaacgaaaacgaatctgccgccattgatacgctcggcgccgagctcgtctcctttatgggcgatgacggctttgagcacatttggcagggcgataaaacatattggggcggccacgcgccggttttgtttcctatcgtcggcgcgctgcgcgataaccgcacatgcatcaacggcgagtggtatgagatgaagcgccacggcgtcgcgcgccacgaggaattcaccgtcacagagcagggagaggactacgtcaccctgcagcttacggcgaacgaggagacgaaaaagcagtacccgttcgattttgtgctgacggtctcctattacctcaccggcagcagtatcacgacgaaatttaccgttaaaaatgccgatacgaagcccatgccgttctgcatcggcggtcacccgggctttaatatcccgattcagtccgatgaagtttttgaagattacgacatcgtgttcgaggaaaaggaagagcagaaatgcccgacgctcgatatggaaagctgcctgatcgattttgagaagacgaacttcgagcttgacgatacggataccatcccgctgcagcacagcctgttctataaggacgcgctcgtgtttgagaacctcaactccacctgcgtttcactcaaaagccgccagtccggacgtggtgtgatgatggagttttccggcttcccgatgctcggtatctggtctgccgcaaacgacggcccgtatgttgcgctggagccgtggaccggctgcgccaccgccgtacaggaggacgacgtgtttgaaaagaagcacggcatgcgcactttgcagcccggcgaagaagccgagtacgcctacacggtctttgaaatctaaattacaaaagtacgtatactatatataataaaagcatatagagcatgccccgcaaacggatgaaaagtccgatttgcggggttgttttattgcctaaaaatctcaaccaaagtttgtttgttctcacggagagaaaatcgcgaaaaagggttccattttaacagaatacagttataatagtttaaacaagcgtatgaagtgtttctgcgtaaatattccatgcgcctgaggaggaaaccgcacgtacggtgcggactgtaccaaaggtacaactgtaccaagggtacaaagaaagcaggatatgcattgaaaggaaagggaacgctatgtttcagctgaaatgggtttggaaaaacctggaaggctgccgaaagcgatatgttttcgcgctgtgctctactgcggttctttctatgatggcgctggtcaactcggttttgactgcgcagatcatggacaccgtatttacgccggtaaaagaggggcaaggcactacgccggagctttggcatcagctcgttgtgctcgtctccattctgatcggtttcacgatgttcagaatgtgctttaactatctttcggttatgacgtacgagacgtgctcgcagaagctgctctttaagctgcgccgcgatctgtacgcaaacatgcaggcgcaggatagctcattcttctcaaagaaccgcaccggcgatctgatgacccgcctgaccggcgaccttgacatggtgcgccacactacgtgctatgtcatccgcatgatcatcgactgcgtggtgctgtttctcaccacatccatcacattcctttgtgtggactggctgttcgcgcttgccatgctggccgtaacgccgattattttcgtcctgacgaaggttttcgcaaagcaggtgcatccgctgtatgtcgacctgcgcgagcgcctttcgcgcatgaacaccgccgcgcaggagaacattgccggcaaccgtgttgttaaggcctttgctcgcgaagactacgagatcgagcagtttgataagaaaaacgaggattaccgcaaagcgaacctcaaagcgtcgctgctgtggttcaaattctcgccgtatatcgacggtttttcgcagtcgctttccatcgccgttctgctcgtcggcggctcgttcctcatcatgggccgcatttcaatcggcacgtttgcactctttaactcgctgtgctggacgctgacgaacccgatgagcacgctcggcatgctcatcaacgacctgcagcgtttctttgcctctgcgtcgaagattgtcgagctctactacgcgcgctccaccatcgtcacgcgccaggatgccgtgaagaaggaaggccgcgtgcagggcgctgtgaagtttgaccacgtaaccttaaagcgcaacggcacagaggttctgcacgacatcaatcttgacatcaaacccggcgagaccatcgccatcatgggaccaaccggctgcggcaaaacgtcgcttatcagccttatcccgcgcttttcggatgtatccggcggtaccgtctccgtggacggcacgcctgtcggtatgtatgatctcaaaaagctgcgcggctccgtcggtatcgccacgcaggacgtgttcctgttctccgataccgtagacggcaacattgcctacggcgaccccgaaatgtccgaggacgatgtgaagcgcttcgcaaagatcgcctgcgtcgatttcgttgataagctgcccgaaggctttgatacggtcatcggcgagcgcggcaccggcctttccggcggtcagaagcagcgtatcgcgctggcgcgtgcccttgccattaaaccgtctattctcattctggacgacaccacctccgccgtggatatggagaccgaaaaatatattcaagaccagcttgcgcaccttgatttcgactgtacgaagatcattgtcgcgcagcgtatttccaccacgaagcgcgcagaccgcatcgtgatccttgataaaggccgcgttgtggatgtcggcacgcacgaggagctcatttcccgcccgggctattaccgcgaggtttatgagctgcaaaacggcattgccggtgaaaagaaagggggtgctgcgtaatggcaagaaaccgttttgacgttgacgaaacgctggaaaccccattcaatatcaaacacttgctgcgtgcaggcgtgtatatcaagcggcacaaacaaaaaatgatcttatcgctcgttttctccgccatttccgccgcgtgcgcgctcgtaggccctaagctcatcgagaccgccctgaacgtcgccgtgccgaaccgcgattataaaatgctgttcattctggcaggcatcatgctcttatccattctgctttccattttcttttccgtcaagcgctcacgctacatgacggtggtggggcaggccatcatctacgacatccgcaaggatctctttgagcatttgcagcggctttcgttccagttctacgacgaccgcccgcacggcaaaattctgacgcgtgtcatcaactacgtgaactctgtttccgatgcgctctccaacggcatcatcaatttcattctcgaaattttcaacctcattctcatcgccgtgttcatgttcatgtgtgatgtcaggctctcgctcgtcgtcatggcgggcatcccgctgttcctcatcatcgtgctcgtcatcaagcctgcacagcgccgcgcttggcaggatgtctccaataagagctccaacctcaacgcctacctgcatgagagccttgacggtatgaagatcacgcaggcgttcacgcgtgaagaggaaaatgcgaagatctacaacaagcttaacaccaaaatgtacaaaagctggatgaaggcgcagtacacctcgaacctcgtgtggttttccgtcaacaacatctccacatgggtcgttggcgctatgtaccttgtgggcttctcgcttttgggtcccgccgtgcaaatcggtacgctcatcgccatttccgcgtatgcgtggcgcttctggcagccgattttgcagctttccaacctctacaatacattcatcaacgccgtggcgtatctggagcgtatcttcgagatgatcgatgagcccgtgcttgtcgatgacgcgccggacgcaacggagctgccgccgattaaaggcgacgtgacgttcgacgacgtgacattctcctacgacggctccatcaacgttctggagcacttcaatctcgatgtgaaagcgggcgagtccatcgcgcttgtcggtcccacgggtgccggcaaaacgacggtcgtcaacctcatctcgcgtttctacaacatcaattccggccgggtgctcgtcgacgggcacgatatctccaaggtaacgctgcactcgctgcgcgcgcaaatgggcatcatgctgcaggacagcttcattttctccggcaccatcatggataacatccgctacggccgcctggacgccacggatgaggagatcatcgccgctgcaaagaccgtgcgtgcgcacgagttcatcagcgaaatgccggatggctactatacgcaggtaaacgagcgcggctcgcgcctctcgcagggccaaaagcagcttattgcgtttgcaagaactttgctttccgacccgaagattctcgtgctggacgaagccacgtcctccattgatgcgaagaccgagcgccttttgcaggaaggcctgcaggcgcttttaaagggcagaacaagcttcatcatcgcgcaccgcctgtccaccatcaaaaattgtgaccgcatcctgtacatctcgaataagggcattgccgaaagcggcagccacgacgagctcatggaacagaagggccactactaccagctttataccgcacagctggaagagtaaagcaagcaaatataaagctaaaaagtaatcagcctcatcgcgccgaatccgaccgatgaggctgactttttataactgaatatcttccggtttatcgtcgtacacgccaagctcgaagttccgcttgccggggagctttttggggatctccatgctgtgcaggtcttggtacgacgtaaactccgcgtcgttttgcggcggcgtgggcatgaggccggtgcactccgtggcgcttgcgacgctttccggcgtatcagggtaaatcgtcacatgctcgccgtgggtgaacttcttttcgtttttcttttgcatttggcatcccttccttcccacagtattgtgcgccgaaaagcgaagtttatgcaaaagaaaaaagcaccggtgaaatccatcacaggtgccttttatctcgctgttctaatttacaattagagctttacgacatttgctgcgcggagcttgccgttcttcgggtcggtctcggtctcaaaggtgaccttctggccttcgttcagcgtcttgaagccgtcgccctgaattgcggagaaatgtacgaatacgtcctcgccgccctcatcgttggagatgaagccgtagcccttttctgcgttaaaccatttgactgtaccgttgttcattgtggtacctccatataaaaataaagattgtgttcgtaaacgccatacaaaaaaacacaggtcctgtaaaccacccaaagaatgacttacaaagaaaacctgtgagacattgacattgtttattacactatccaaagtataacagcttttccgccgaaagtcaatctaaatttgtggagtatgcggccttttttgttcacatgtttttcaaaaaaacttcctctttttttcacgaaatatcaatttcgttttcatattcttactctatactacgtaatgtactcaggaggaacaagagagaaccgaatgagttacaaacttcttcattttttacttccttcatttctttaaaacgttccgcaccgggtcgatagccgggcgctgcttccccacagcgtttacgcggagccgaaaatcggaaacagttcgtttcttccgatattacccctatttttaccccactgtcctctgccgggtgctgcgagcccggcagtgcggcagaccaaaaacgatcgcctttgcgtaacgatttccttcgttgtgcaaaggtgtttttaattgccgcaaatacttttctctccgcgtggaaaagtaaaagcagaaggctcgtttgagctttctgaatttttctgcaaggagatgagaaaacttgaattttgaaaatgaaccgcaaccgcacgccccaaaacgacgcgacatctcgctttttgagggcatccgcacatttgcggcaagcgtgggcacggcggctttactgatgctttccgtgtgcgggctcatcggcctgccgctgccggaaaacgcaacggcgcacgccgtttccgcttcccatatcacggcaaagacagaaacggtgcgcaccgtgcagcttggcggcgatgttttcggcataaaacttttttcggacggcgttattgttgccgcactttcggaaatttatgcagacggtggcttaaaatgccctgcaagcgaagccggcattcagcccggcgattatatcctttccgtaaacggcaataacgtagagacgaacgctgcgctttccgctgtgctttccgaaaacgaaacgaacacgctcatgctgcggcgcggcacggaaacgttcacggcgcaggtcacttccgttttgtgcgagggctcgtacaaagcgggcatgtgggtgcgggacagcgctgcgggcatcggcaccgtgacgttttacaccgaagacggcaaagcgttcggcgcgctcggccacggcatctgcgatgccgacacgcgcaatgttttggagatccgcagcggcgagccggctgccgtttccgtctgcggcatcgagcgcggcagcagcggtcggccgggccgcctgcgcgggtattttacgggcggcaagagccttggcacgctgacgcagaacacggagcttgggctttacggcaaactctccgcaccgcacgagggcgagtccgtagaggtgctgccgcgcggaaatgtgcatacaggtgccgtacagatcgccgccacgatcgacgatgaaggtatgcggctgtttgatgcggagcttgagcgcgtcagcacagacggcaagcaggaaacacgcacccttgtgctgcacgtgaccgatccggaactgcttgcacgtaccggcggcattgtgcagggcatgagcggttgccccattttgcaggacggtaagctggtcggtgcggtgacgcatgttttcgtagatgatgctacacgcggctatggcatttttgccgaaacgatgctcgaaaacctgaacgaaaattaagacgagagggacggtgggctgcggcgcacgcgtccctttttcgcgctacattgccatatttctcacagaaggtatgacacaatcttacagaatcggttttcgttctgtttcatacatctttttggtaagaaactcgccggaatattggatgtaataaaaatgtcttattatctgctgatttttgtcgaaattagaagtgtatcaaccgaaagcgcgatgaaagctaacaaaatcaagatgcatatttttgttagaagacaaataaattaaagaaatttcatttaccctcttgaaatagcgtgtatgatatggtaaaatttgttcacaatttaaatcacgcaggaggtaagccatggaaaagcaaataaaggtcatcatttgtgcggatgacggcgaatggagccgtgaaaacaccgacgcattggcttcgcggggtgcacaggttgtgaccgtaaccaggaacggaacagcgctactgaccaaaatacgggatgaaaaaccggatgtggttgtaatggatctctttatggcgggcgtggatgcgctgggcgttatgcacgcagtgaaggccgagggactgccaaagccggtgttcatcatcacggcagcgcattcctcaaacactttggagcggcagatcatggaggccggcgcagattattacgccatccagccgttcagcaaaaccgagatcatcgaccgtatctttacgttggccggtgcggcacagcatccgtcaagcggcaccagccgcagcgacctgcgcattcaggtcacggagattctgcatcagattggcgtgccggcccacattaagggataccactatcttcgggattccatcatcatggccatcgaagacccggagattatcaatgcggtgacaaaacagctttatccgagtgtggcaaagcagtacgagaccacgagctcccgtgtggaacgcgccattcgccatgcaatcgaagtcgcttgggatcgcggtgatgtggatgtgttgaattcgtatttcggttacaccattcacaatacgcggggcaagcccacgaacagcgagttcatcgccatgatttccgataaactgtgtttgcagatggacaatgcgtcttaatcgacaaaatgtgaactttttacacatgctttgtgtgatccgtttgtcaaagctaacacgaatttcagtacataattaaaattgtattttgcaaagcaacaccttttgaccgtagcaccgaaaatccgagcatttatgcttgattttgtcggcagggtaagaggtgttgcttttttacagtaaaatcgcgtgccgaagcgggggagaacctaccgacgcgcggttttacataacaaaagccctccgagattactcccggagggctttgcttgtgattcggttgagcgttgtgacgaactatgttatttcgcgaaatcgaccgctctgctttcacggatcatgttgaccttaatctgacccggatattcgaggtcttcctcaatcttcttgcagatgtcgcgggcgagcagcgtcattttctcatcgttgatcacttcgggctttaccatgacgcggatctcgcggccggcctgaatggcgtagcagcgatccacaccgtcaaacgatgcagccacggcctcgagcttttcgagacgtttgatatagttttcgatgttctcgcggcgcgcgccggggcgtgctgccgagatggcatcggctgcctgcaccaggcaggcaatgaccgttttcgcttcaatgtcgccgtggtgtgcggcaattgcgtggataacggcttcgctttccttgtactttcttgcaacatccacgccgatctccacatgggagccttcaatctcgtggtcgagcgctttgccgatatcatgcagcaaacctgctcttcttgcaatggtggggtcaaggcccagttcggaagccatcataccggcaaggtaagaaacttccagagagtggttgaggacattctgtccatagctggtgcggtaacgcagccgaccaagcagcttaacaagctcatggtgaatgccgtttacgccggcagcaagcacggcgcgttcgccctcggctttaatggtcgcatccacttcgcggcgggctttctcaatcgtctcctcaattctggtcgggtggattctgccatccgagatcagcttttcaagggcgattcttgccacttcacgtcttacgggctcaaagctcgaaagcgtaatggcttcaggtgtgtcatcgatgatgagatccacgccggtaagctgttcaatggcgcggatgttacggccttcgcggccgatgattctgcccttcatttcatcgttgggcagcggaacgacgctgatggcggcttcggatacgtgatccgccgcgcagcgctgaatggcgaccgaaatgatctctcttgccagcttgtcgcattcttccttcgtctgctgttcatactccattactttaatggccttttcatgcacaagatcatcctcaagtaacttgagcaaatactcttttgcctggtccacggtaaaggaagagatcctctccaacatgtcgatctgacttttcttaacggattctgcctctttcaggcgttcctccgccttgcgcatcttattttcgaccgcgttttctttggattccagattttccatctttttatccaaagattcttccttctgggaaacgcggcgctcctgacgctgaatttcttttctgcggtcattcatctcgcgttcggactcgttgcgcagacggtgaatttcgtccttgccctcgagcacggcttcctttttctttgcggcagccgttttaatcgcgttgctgatgatccgcttggcttcgtcttctgccgaaccgatggcagcttccgcttctctttttcgatgattcacacccgcaaagaaagcgagagcgccgcacaaagcggcgactgccagtacgatcagaacacaaccccaaattggtacttgtggcattgggcacctccttcgctaaggttttcgatattcaattactaaattaggttatgcagggtgcgttattccctgtgaaggctcacacaaaaagcagccgcataaactgctcggaacacggctgacttaaaaagtgtaaaacactccatgtacaattttatctcttttccttgcatatgtcaaccaaagaatttaagaaatagttacggtttctttctgttttatacaagagcccagtatataagccgatttttttgctttttagaagaaaaattttttctgtgggtctatttatcccgcttttcttccgcttcttccattttgcggacaagctcgctggggcgcatatcaaacgcttccgcaatcttgcatatcgtcgagaaattcgcctgctttgtcccgcactcgatcatcgtcagatgcgtgcgcgcgatgcccgcaaagccgcttaaaacctcttgcgacatgccttttgctttgcgcacagaccgtattgtttgccccacaatgttgttttcccaaagcaagtgtatcacctctacgcaaattgtatgcgtaaatagacattttactgtctacgataatagacaatgaagaatttatgtgaaaaactcttttcttgggtgttgacatttcagaaaaacggtgatagtatgggggacaagaaaagggctttgataaggaagttcgggttcaggtcttttcaaaagagagcggttgccaccggctgaaagcaccgcggaaagcgaaaccgaaataccacctttgagccgccgccgaacggtttaccgaaaaggcggacgttgccgccgcgttaaggcggaaaaacgagctgtgtgttaacacaagtgtgttttaacacgcaggaactcgggtggaaccgcgcagtgtcgccccgagatcccggtgagggatcccggggctttttattttgtcatagaattaggaaaggattgagaatcatgatcaaggttgacctgaagggcagcgaaaaggaatttgaaagcggcgtttccgtagcagaagtcgcaaaaagcatcggcatgggtctttataagtccgcatgttccgcaaaagtgaacggcgaggtgtgcgacctgcgcaccgtgctcaacgaagattgcaaggtagagattttgacgtttgacgataaagagggcaaaaaggcatattggcacaccgcgtcccacatcatggcgcaggcggtaaaccgcctgtacccgggcacaaagttcgccatcggcccggctgtggataacggcttctattatgatatggagctgccgcaggccatcaccaacgacgacctcgcaaagatcgaagctgagatgaagaagatcatcaaggaagacatcgagattgaacgcttcgagctgccggtagcggaagcactggagctcatgaagggtcaggactataaagaggagctcatccgtgagcacgctgccgagggcgagcacatctccttctataagcagggcgatttcacggacctctgcgcaggcccgcacctcatgcgcaccggcaatgtcaaggctgtaaagctcacctccatcacaggtgcatactggcgcggtgatgcaagcaacaagatgctgcagcgtctctacggcatcgcgttcccgaagcagagcttgctggaagagcacctcaccatgatggaggaagccaagaagcgcgaccacaacaagctcggccgtgagctggagcttttcaccacaagcgacgttatcggtcagggcttgccgatcctgctgccgaagggcgcacgcatcgttcagcttctgcagcgcttcgtcgaggacgaggagcagcgccgcggctggctgctgacaaagaccccgttcatggcaaagagcgacctgtacaagatttccgggcactgggatcattataaggatggcatgttcgtgctcggagacgaggagaaggacaaggaagtcttcgccctgcgcccgatgacctgcccgttccagtatcaggcttatttaaaccgcaagcgttcctaccgcgacctgccgctgcgctacaacgagacctccacactgttccgtaatgaagcaagcggcgagatgcacggcctgatccgtgtgcgccagttcaccatttccgaaggccacctcatgtgcacgccggagcagctggaagacgagttcagaaagtgcctggagcttgcaatcttcatgctgaagacactcggtctgtatgaggacgtttcctaccgcttctcgcaatgggacccgaatgaccgcgaaaagtataccggtacggaagagcagtggaacgaggcacagggcctcatggagcgcatcctcaaccacctcgagattccgtacgagatcggcatcggcgaagctgcgttctacggaccgaagctcgatatccagattaagaacgtgtacggcaaggaagatacgcttatcaccattcagattgaccagatgcttgccgagcagttcggcatggtctacaccgataaggacggcaagcagaagaccccgtgcatcattcaccgtacctccatcggctgctacgagcgtaccctcgcgttgctcatcgaaaagtacgcgggtgcgttcccgctgtggcttgccccggtacaggtgaagctgctgcccatcgcagaccgccacctcgactatctctatgaagtcaagaagcagttggaagacaagggcttccgctgcgaggtcgacgaccgcagcgagaagattggctacaagattcgcgaagcacagctcgaaaaggtgccgtacatggtcgttgtcggcgataaggacatcgaaaacaacaccatctctatccgtaagcgcaaagagggcgacctcggcgccatgaccgtagagcagttccttgaaaagattgttccggatcgcgacaacaaggtcattgactgatcgaatacaatataatatagataaagaacaccgtccgctcggagcttttccgaacgggcggtgttttgttatctatggatcgcgtgaaagatatacggttaatccttcagctcgtcccgcgagacgattttcagttgcgatttctctgccagctgccggtattccgtcggcgtgatgccgaagtacttcttaaatagccggcagaacgcagaagattccgaaaagtggtacatttcggtcacttctttcacggataacccgcggtggatgtgctctgcggcggcgttcatgcgtatacggttaatgtaattgctcggggtggaatcgaagttatcttgaaaataatagaacagtgcgcgttcggaaatcgaaagctttttcgcaagttccggcacgcttattttctccgttgcgtggtcgagcaggtattgggtgattttgtccttgttggagaggccgtcgtaattttgcttaagggtaaaaatgcagtccagtataaatccggaaagaacttggttcaggcagcacttggtatagctgcaaacgcgctttctgaggaagtcgctgtaatcaatcagctgtgtattataaccgacagggctcagctttccgcacaaaaagtcatttaaaacatcggcgtcttcgccggaacagtcggaaacgcatttcattgtaaagggaagccagagaatctgcatgttgtcgcagcagcagtgattccaaaggattttatcgctgcggcgcacacaaatcactcctccggtaattatattaaaaatgtcgttgttcaaatataaatcgcttttttcagacgaagctttgatgcagagcatcaaaacaaactgctgattttcaaacaattcatccaaattttcgaaatttgggaggccccaatgcacctttccgagggcaatagtaaaattgttcaaaatggatgcggtttcatgctcgcatttttgtgtgtctaagatagtgctttgtgacatatgcccaccagcttcaccataaaatttactctttgtacctatattgtacacggtttgcataatttgtccttgaattgttacaaatgcgtgtgtataatatgaacaattcctgaagaagttgttgcggagatttagacaaatttggaaaccatccgaacatcgttcagggctttcaacgagaaaaccgtaaaactgcaaaaggcagtcggtttcaaaaaattttggctttaagcaggctttgagttctgctttttgtaaaaaattttccatcttttgtggaaatggagcgtgatgagattgaaacaagcacaagcgagtggaaaggcggtctcacgcaaaaagaacgctttttccaaaatgcttgcccagtgggatctgcagatattgttagttcccggcatcctcttagtcctcctgttcagctacgtaccgatgtacggcgtggttatgggcttccaggatttccagctcggtgatttcccgggcttcagccagtgggtaggcttcaaacacttccagaccatgttcgccgataagtacttcggactggccatgcgcaacacgctggtcatcagcgcccttaagatgttcattggcttcccgctgccgattttcttcgcagtgctgctgaacgaaatgaacttccagccgctgaaaaaaacggttcagaccgtcagctacctgccgcacttcatctcttgggttgtatgtgcaacgttgatgtttgacctcatgtccaccgacggcggcgccatcaatgagttcctcatgtggatcggcgtcgttaaagaaccgatcggcttcttcaccgaaggcaagtacttctggggcattacattgtgcacggatatctggaaggagcttggctggaacgcgattatcttcatctccgctatcacgagcatcagccaggatatgtatgaagcggctgatatcgacggcgcaacgcgcgcacagaagatgtggcatatcacaattaagtccatcaaaccgaccatcatcctgatgtttatcttccaggtcggcggcatcctgaatgcaaacttcgaccagatcatgatgctcaccaagcagatgggcaactccatgttgaaagaatacgcagacgtgctcgataccttcatttatcgtttgggtgtcagccagggtcgtttctccttcgcagcagcggccggtctctttaagtctatcgtcaacttcgcactgctccttggttccaactacgtagcaggtaaattcggcgaagcacagcttttctaaggggggaacagagagatggcaaaaaatccaaacaaaatccgcgccaagcgcgtggccagcgactacgtgatcgatatcatcatgatcgtcaccatcgttctggttcttgtccttacgctgtacccgttcctgaatgcccttgcgatttccttgaacgactccaacgataccacccttggtggtttgaccatctatccgcgtaagtttacgtggagaaactacgagctggttttcacaaaccagaagatctggatggcgtacttcatcaccatcgcacgtaccgtcatcggtacggtcggcggcgtgctcattaccggtatgctggcgttcgcaatttccagaacgaacctcgtaggcaaaaaagtttacgcaatgctgtgtcttatcccgatgtacttcggcggcggcctcatgccgacctacttcttgatcctcaatctcggtctcaagaacaacttcctcgtgtacatcatcccggcactcgtcaacctgtggaacatgatcctcatgcgcagctatttccagtctctgccggaagcgcttgaagaatccgctctcatcgacggcgcaaactacataaccatcttctttaaaatttacttcccgctctccacaccgatcatcgcgacgatcgccctgtacttcggtgtgcagcactggaacgactggttccaggcaaacctgtacattacacaggattacctgaagccgatgcagaacgtccttctcggaatcgtcaacgaagcgaagttcgcagaacagatggcctctgcgggcatgggcgtcaccatcgacgccaacatgttgaagggaaaggagaccaacgtgcgctccatcacaatggctacgatgtttgttacgatcattccgatcatcatcgtttacccgttcctgcagcgctacttcgtaaaaggcattatgatcggctccgttaagggctaatcataaaataaattgtcaatgcaaggtgtattgacgaagcattctttaaggaggcaaagtatgaagtccagaaactctctcttgaaggctctggcagcagtcatggcagcatccatgattctgacagtagccggctgcggcggcggcggaaactcttccacggctggcagcagcacatcttccaaaacggaatcttccgcagcggaatccacagacggcggtgacgcaagctccgaggtaaccggttcctccggcccggacgacaccaccgagcactacgaatttgatgcatattacagctatcagggttccgttaagccctggggcgaagacgctgcatcgaagtacatgaacgaaaagttcaacatcacggtcaactattcctgcccggaagccgatgcggattccagactgaacctgatgatctcctccgacgacctgccggatgttatcatcatggaccgtaacgcgaactggcagaagctcatcagcctcggcaagctcgtcgatatcaacaccttgaggtatgaaggctgctcctttgatgaggacatcctcgaatcctcccagaagctgctgtccgttaacggcggtctctatggtatcccgaactgggctcgtaagggcgctaccggcggtaacgcgagctggatggtcaaccacgacgtttatgagcagctcggttctccggagctcaagacgctcgaagacctgcaccagttcatgctggatgctaaggacaagggcgttaagacttccgacggccagagcatcttcccgtggctcccgagacaggacgataacggcttcaacaccgtttccgctatctatcgttcctacggcaacccgaaccttgttgatacatactggtctcaggcggataacgacattaagcttgctgtctttgacgacaactacgtctccgctctgaagattgctaaccagtggtttagagaaggcctcttcccggaaaccatttataccgacagcaacgatcagtacgtagagaagctctccaacggccgtggagcggttctgtactatgacttctctcaggacgataccaaccacttccgtaccctccttcaggagaaagacggcaacacctacgatctcctcggttgggagcttaaggattctccgatcttcccgccggctgaaggcgtagattgggtatatggcgaagaaaacggcacgcctggtagcaacgtcaactgcatcaccacaaaggctgaaaacccgcagcgtatcttcgatctctattcttggatgctcacgaaggacggctccatcaacatgatgtacggtcctgagggcggcctctgggaaggcaaggacgaaaacggcaacccgatcctcaagaagccggaagaagagcttagctctgacgaaaagaacgcagcaggttgctggttctgggctcagccggctcacgccgataacgttgacttgacgaagtatgcagttaacgatgcacagccggaagcatccagaagctgggttatctccattcaggctcacgtcttcactccggaagattccgtccatccggcagtccccggccagaagttcctgaccgacgaaaacgccaacctctctcttgagatcgatccgaccgaagacctcggtatggcaagacaggctatcgccgatgagtgcaagatgcgtatcccgcagatcatcatggcttccgacgacgcaacgttcgataagctcgttcaggatctgaaagactttgctgagtccaatcaggttcatgacattgagaagatctacaccgataagcgtgcatcgaacatcgagctccagggctacaccgcatatcaggattattacgacgcacagaagtaatttaacgggttactttagttcgtaaactaaaacaaaacagcgccccgctttcaataaaaggaagcggggcgctttcttgtttccggttcttaaccgaaaatcatatccagtacgccgaggtgctctaacaaaattttcacacccatcaaaatcagcacgatgccgccgacaagctctgctttcgatttatacttcgcgccgaaaatgttgccgatgcgaataccgatcgccgaaagaatgaacgtcgttgcgccgataaagctgatggccggtacgattttgacctgcaaaaacgcgaacgttacgcccaccgccagcgcgtcgatgctcgtcgccaccgcgagcggcagcatcgtcataaagctgaacgaatcgttgaggttctccgcttcctcgcgcgattcctttatcatgctcaggccgatcagcaccaacagcacaaacgcgatccagtggtcgaactgctgaatcattgactggaactgtatacccaaaatgtaccctaaaagaggcatcagtgcctgaaatccgccaaaataggcacccacagtcagcatgtgtttcgctttcagctttttcaccgaaagccccttacataccgaaaccgcaaatgcgtccattgaaaggccgactgccagaattaagagttcccataagctcattttaatcaccgttttccgttgttttgttataaaaatatacgtgcgcgggcaataaaaaagactcacccgaaaagccggagatgcctttcggataagtctcgtcatttcatgcatagccgtgagtttcctcaagtgtgtcggccatacagcgcttcgcgccgactactcccttatcgcagtgtcgctttgcggcaccgatactcatgtttgcttattaaaccacaaatatggacttgtgtcaagctaaagtcgcggctaacctataagaacttttgaaaacggcttagttcaacatcttcgcatgcaattactgaaaataaggacgtatttttgcggaaattgagtccttgttttttatcttcatatctgatattctgtgaaatagaacaaaatgccgcagctttacgcggtcggaatacaaagcggcaaaggaaaaagccgcacgtgcaaacgcacagaaaggaacggaacatgaaaattcagagaatgaaaacaaaccgtatcgtcaacccgctcggttttgatctgaaaacgccgcacgtctcgtggacagtcacggataccgaagcgaaaaagcagctttgggcgcgcgtggaggtttccaaaacggaggattttgccgacgttatctttgataccggcgcgtgcaaaaccgcgtcgtccctcggtgtaccggtggaaatcgccctcgagccccgcacgcgctacttctggcgcgttaccgttatgggcgataacggtgaattggtcacaagcgacactgcgtggttcgagaccgcaaagctcgacgagccgttcacggcacagcgtatttctccgtgccttgcgtcggacaccgccccgtacatgcgccgcgcgtttgagatcaccggcgaagttctctctgcccgcgcatacttcacgggtctcggcatctatgagctctatttgaacggcgaaaaggcgaacgatgagtaccttgtccccggctgcaccgcctacgacagctggattcagtaccagacctacgacgtgaccgacctcattcacaccggcgaaaatgtcatcggcgccattttgggcaacggctgggcgaaaggccgctttggttttgacggcgtcgtcggcgattacgaaacgaatttcccgggaaaaccctgcaacatgtacacagaggaatatctgctcttcggtgagctgcacgtcaccaccacgcagggcgagaccgtcatcgtcacggacgaaggctggcagtgcgcgccgaacccgctgacgttcggcaacatctacgacggcgagcgctacgacgcgaacctcgaaatcgaaaactggtgcgcgccgtcctgcacctatgcaaattggcagccggtgaagcgcaacaccacggcgaacctcggtgcaatttccgcgcgcctctcgctgcccgtaaaagcaaagcatatcatcaccccgaagcagatcaccacgccgaaaaacgagcttgtgttcgacctcggccagaacattacgggttggttcacgttcatggccgacctgcccgcaggtgtcgagctgcgcgtgcagaccggcgagctgttgcaggatgactgcttctaccgcgataacctgcgcactgcgctttccgagtaccgctatatttcgacgggcaaaaaagcctttattcgaccgattgcgaccttctacggcttccgctacatcaaattctccggcgtggcagacctcaccggcatcacggatattcaggcgtgggcgctttattccgaccttgagcagaccggcgagatcacgaccgcaaacgagaaggtcaaccgcctgtacttgaactctgtctggagccagcgcgataacttcctcgacgtgccaaccgactgcccgcagcgcgacgagcgcatgggctggacgggcgacgcgcaggcgttctgccccacggcgaactacaacatggattgcggcgcgttctatacgaagtatatccgagaccttttggaggaacagaagcgcctcgacggcaaggtgccggatgtcgccccgctgctcatcagccgcaagccgggcgaagcaaacccaatgctcgcaaacggcggcggtcactgcggttgggcagacgccgcagccatcgtcccgtgggaaacctacattgcaacgggcgacatcagcgtgctcaaaaacggcttcgagagcatgaagctgtgggcagattggatctaccgctacgacgaagcgcacggcgcaacacgcctgtggccgggcattgagttccactttgccgattggctcgcactggacggcccggaatccggcttcaatcccgagtctgttctcggcggcacggacattacattcctgtgctccgcctactactataagagcaccatgtgcgttgcaaacgccgcacgcgcgctcggcaaaacgaccgagtacgacgtctacaaaaagcgtgcagacgaaattctcgacgccatccgccgcgagttttacactgcgggcggcagatgcgcggccgcaacgcagaccggcaacgccatttcgctttcgtttgggcttgcgccggagttcgcacgcgagaagattaccgaaaccctgcgtggcctgctcgcgatgaataaaggcaagctgaagaccggcttcctcggcacgcctgtgctgtgccgcgcgctctccgataacggcgcgaatgcagaagcctatacgctgcttttgaacgaggaaaatcccggctggctgtatgaggtcaacatgggtgccacaacgatctgggagcgctggaactccgtcaatccggacggtaagatcagcggcatcagcatgaactccatgaaccactacgcttacggcgcggtgttcgagtgggtgtataagaacgtctgcggcctgaaccccgtgccggacgtgcccggttataaaaaggccgtcatccgcccgcagcccgatgcaagactcggcgcggcaaaagccaaggtcaataccgcctccggctactatgaaaccggctggcagtacgaggataacggagaagtgacgtacaccgtcgtcatcccgtttgacgccgaagcggaagtctatctgccgaaaaaagacggtaccacggaagaaatgacgctcaccgcgggcacgtatacgtttacgctgtaaaagttttttaagaataaacagagagcgtcggcaaaaagaacgaaaaatctttttgtcgacgctttataacgaaaaaatcaccgaggaaaaactcggtgattttttcgtttaaggtgtggatttatgaaaaggggcttgtacgcaaattatggggaattttgcttctaccattatcatactaccggtaaaacgcagagtcaataaaccgcgcgtaaaaaccgtatgtcatttcggaaaagatttcaccgccaaatgccgtttcagtttgtgaaatcagcacaaagtgtagtattctatgactttcagcggttattctctttaatcacccgcacgcgcgcgaaaagctcccgcgcggcagcttcgggatctgcactcttcatgatggccgaaacgaccgctatgccgtcaatgggactgccattcaaaacatccatgttcccggcatttaaaccgcctatggccacgaccgggatcggcacgctgcggcagacatcgttcaggcgcgaaaccggcgtcagcacggttttcaccttcgtggtcgtcgggaagatcgcgcccgtgccgaggtagtccgcgccttcgcggtacgctttctgtgcctgctccacggtttttgccgttgcgccgacgattttatcttcacctaaaagctttctcgcttcacagacgggcagatcactttgacctacgtgtacgcccgccgcatctgccgccatggcgatgtccgcgcggtcgtcgatgataagcggcacacggtagcggtcgcaaacagcttttgtaaggcgcgcaaggcgcaggtattcaccgccgccgcgctctttttcgcgcagctgcaccagcgtcacaccgcccgtgagtgctttttcgaggatggaaagaaagtcatcgtctgtgcggccggtgctgtcggtcacaaggtataaggtaggatcgaatttcatagaaaaactccttcttttaaacttcgcgcagctttaataaacgcgtgtaatcatcgtccgaaagcagcgaaagtgcgtccaaaagcgcgatgcggaacgacccgagcccctcggatttccgttcggccagctcaccgcaaatgcccatggtggaaacggctaaaaccgcagccgtaaacgggtcagtcacggcgctgtatgaagcgcacaacgcgtgtaccatgcagcccgtgccggtgacgagcgacaggcgtggtgtgccgttttcgcacagcacagttgtttcgccgtttgtgataatgtccgttttgccggtgacgagcaccacgcagtgcagggtagaggcgagcatttttgcaatttcaatcgtttccgccgtgttcgtccgtaaaacatcgatgccgcgactttcaaaatgcgcgcccgcaatggcgcgaatctccgcgtcgttgcccttcaaaatttccgggcaggcctcgcgcagcagcgtgtgcgtcaggtcgcggcgcagggcgctgcacgtcacgcccaccgcgtcaaaagagatcggcacaccggccgttttcgccgccttggcactcgtcaaaacggaggtgcggcgcgcgtctgtgatgttgccgatgtttacgccgagcgctcccgctatgcacgtgatttcctccacctcgtcgggatgctccgccataataggctttccgcccacggcgaggatcccgttcgcacagtcgttgatcgcaatcggattcgtgatgcagtggatgagcggcgccgtctcgcgcagatcatttcgtgctttgagcagcgcgttttgcagctgtggtgtcatagaccttcgcccccaaatcatgttggaattttgcaagcagtccgttgcggcgcagcgccatgaggaacacgaacgcaatggagccgccgatcagcgtgccgccgatgaacgacggaatataaaaagcccatgtcaacccctcgcgcccgacgatgtatgtcatcaccggataagaagccagcgcgccgatgacgccggtgccgaacacttcgccgagcactgcgcaaaggatcttgccgcccgaaagacggtaaaatacgccggaaagaaacgcgccgaacaccgcgccggttaaggcaagcggcggaatgcccatcagcgtcatacgaatgatgccgataagcgtggcgcacagcagggaataccatggaccgaggaaaacggagcagacaatgttgatgagatgcgccatggggcacatgccctccacgcgcaaaatcggcgaaatgacgacgccgatggcgacgagcattgcaagcatgaccattttcagaatgtgttctcttttcattttttgtacctctctaaatataagcgtttccgacccatatttaaaagaggcgcacaaatgcacatagcgaagcgcgcccgaatataaattcaggccgggcggtcgaagctcaattgctttctctcaatccgaaacacggagtcccatcgctatgtgaaagcagtccggcacggcaaatcgggcgctcccccgcgttgccgcttgattaaaatccgccgaacgctgaatttttccttacgcagtatagcatatatcgactttgtgcgcaacggttttgcgaaattcgcgtataaaaataccctgcgaaagaaaattccgcagggcaattttgctatgtacggttatttcaaaaggcgaatacggccgatgaacggcagctcctttactttgccggaagcggcgtttgcgatgccgaggatcatcagcacaaagaagatgatgccgataaattgcagcgcggcggagatcatgcccggcacaaacggtataaagccgagcgcgaggtttaagatgttcgtgatgatgcgcgtcagcaccgaatagcacgcgtagaaaagaaacagcacaagcccctggtttgcgtggaaacgcgcaaaatacgagttgcgcgcagcgaaaatggggatgagtaccaaaaagccgaggtaggaaagaatgccccagccgcgattctcctgaatgtcacgcgggtcgtagtcggcggtgaaatcccgtgcgccgctttgcaaaacggtgttttcaacaggtgcgccgcagtttgggcagcggcgggcatcgtgaggcagcggttgacggcaggttttacaatacataaacataactccttctaaaataacagaaagcagctccgtattcgcacagtgctgccgaaaatcattgcataaagtatagcagttttttcacggattgcaagcacttacaaaaaagtcggaaaaaattcaaaaataggcttgacaaatcgggtcatctccgttataataagtcacgttgcgaaacaagtgacacgaaatccgaaatgcggacgtagctcatctggtagagcgccaccttgccaaggtggaggtagcgagttcgagcctcgtcgtccgctccaaaaaagacctttgtcgattgacaaaggtcttttttcaacgaaataaatccttgcggatttgtgaaatgtgcttcgcacgtgaaatacgcctacggcgtgtgaaatgcctgcgggcgtgcgtggatttatttcatttcacttgatgctagcatcaaatttcacaatgcgttagcattatttcacattttgcatcagcaaaatatttcactaaaaaacttctgaaaatttctaatttcctttaaatatatttctcatcgctaaagttatgctatactttcctaaaaaggaaggtgatagcgtgtcagaatccaaattgcgcgacctatcgacggactttgcggtcaaggcgataaagttaacggaaacgatccacgggcatcggtctatcgttaatcagcttgagcgctccgcaacttccatcggtgcgaatattcgggaagcgaactatgcgcacggaaaagcggacttcattgcaaagctgcaaatcgcgctcaaagagtgttatgaaacggagtattggatagagatatttgtgaaatccgatattttgggcagagaggcggcgcgggagctgtataccttatgcggaaccatccgaagaatgctgatttcttccatcaacaccgccaaagaaccgaaagcctaaaagattttcacgaatccctcattttgtaagacttataaaaatttatgaataaagcggcgaagtcggtgggaaaggttgattttttggcggtccggtggtatgatgatgagtaccggaccgctttatttatagaagaaagggtgagcgcatgaaaagctccattacggtcatttgcgggcattacggctgcggaaagaccaatctcgtgctgaatttggcagcagaggcggcgcagcgcggcagacgcagcgttgttgtcgatatggacgtcgtgaacccgtatttccgctcgtcggattattccgcgctgctcaaaaagctcggcgtggaactcatcgcgccggtgttcgcgaacacaacgctcgatacccctgtgctgccgccggagatcttctccatctttaatatggagaacgccgatatttttatcgatgcgggcggtgatgacgtgggcgctacggcgctcgggcagctgcatcggcaaatcgagactgccgggtacgagatgctgtacgtcgtaaaccggtatcgcgtgctttccacaaagccggaagaaacgcttccgctccttcgggagatcgaaacggcatcgcacctgaaagcgacggcggtcgtgaacaattcaaacctcgctgtgcagaccgatatgcaaacggtgcttaatgctgtgccgtttgcgaaaaaagccgcagaattatgccatctgccgcttctctattccaccgtgccggattttgcggtggaaaacacgttgcccgagggatttaaagcggtaaagcgatatgtacgtttcgtctgggaggacgaaaccgagtaggataaaggaggaaaccgaatggcaaggatcattgtagacgaaaaagtatgtaaaggctgctccatgtgcattcacgcgtgtccgaaaaagatcatcgcgctcgcgaaggatcgtttgaacgcgaagggctatcaccccgcagagctgaccgatgaggcagcgtgcgtgggctgtgcggcatgcgcgaccatgtgcccggattcggcgatcacggtggaacgctgagagaggagttaaaaactatggcagaaaaagttttgatgaagggcaacgaagccctggccgaagccgctattcaggcgggatgtcatcatttcttcggctatcccatcacaccgcaaacagagcttgcggcttatatggcaaagcgtatgccgaagatcggcggtacatatttgcaggctgaatcggagattgcggcggtcaatatggtgctgggtgcggctgcggctggcgtgcgcgccatgacgtcttcaagctcgcccggcatcagccttaagggcgaaggcatttcctatatggcaggctccgacctgccggcgctcatcatcaacgtgcagcgcggcggcccgggcctcggcggcattcagccctcacagtccgattactggcaggcgacgaaagccctcggccacggtgacttccagattctcgtttttgcgccgtccacggtgcaggaaatggtcgacctcgtctccgacgcattcgataaagccgacgaataccgcatgcccgcgatgatccttgcagacggcatgctgggccagatgatggagccggtggagctgccggagcacaaagacagaaagcttcccgaaaagccgtgggcagcctgcggccacgaaaataaaagagagcacaacatcatcaactccctttaccttacgccgaacgcccttgaagaccttgtgcgtgcccgctacgagcgctataagatcgtcgaagaaaaagagcagcgtgcggaggaataccgcacggaggacgcagatgtcatcgtcgtcgcttacggtgcatcgagccgtgtggcgcgcagcgccgtgaataaggcgcgtgaagccggcaagaaggtcggtttaattcgtcccatcacgctgtggccgttcccgaaggacgcgatcaagcgcgcggcagaccacgccaaagagctgctcgttgtggagatgagcatgggccagatggtagacgatgtgcgccttgcggcagagtgccgtgtgccggtgcacttctacggccgtaccggcggtgtgattcctaccccgaaggaaattctgggcgagatcgataaacttttgaaataaggcgaaaggatagaatcaaatggcagttgtatttaaaaagccgtctacgctaacagacgcgccgctgcattattgccccggctgcacgcacggcatcattcaccgccttgttgcggaagcgatagaagagctcggcatcgacggcaaaacggtcggcgtggcctcggtcggctgctccgttatgtgttacgattatttcacctgcgatatggtgcaggcgccgcacggcagagcccaagcggtcgcaacaggcatcaagcgcgcaaagccggaggacgttgtgttcacctatcagggcgacggcgaccttgcggccatcggtacggcggagaccgtccacgcggcaacgcgcggcgaaaacatcaccgttatctttgtaaacaatgcaatttacggcatgacgggcggccagatggcgccgacatccctgccgaatcaggtcacgcagaccaccccatacggccgtgatgtcaacacggcaggttacccggtgcgcatctgcgaaatgctctccacactggacggcgtggcgcttgcacagcgcgtgaccgtcgataacgtgaagaatgtcaatatcgcaaaaaaggcaatcaaaaaggcgttccagaaccagattgagggtaaaggctactccattgtagaggtgctttccacctgcccgacgaactggggcatgtcgccggttgaggcgctcgattggctcgaaaagaacatggttccgtactacccgctcggcgtgtataaagacggcacaaagggggacaggctgaaatgaaagacttgaacatcgtttttgccggtttcggcggtcagggcattttgttcgccggtaaagttgtggcgtatgcaggcctcatcgagggcagggagctctcttggctgccgtcctacggcccggagatgcgcggcggcaccgcgaattgcagcatttgtctctccgatgagcccatcggctcgccgcttgtgacgaacccgaacgtgctcatcgccatgaatcgcccgtcgctcgataagttcgtgaacgaggtcgagcccggcggcacgatcttactcgacagcagtctcatcgacgagcgtgtagagcgcgacgacgtgaccgttttctatgtcccggcatcaaaactggcggaggaaaacggactgaagggccttgcgaacatcatcttggtcggcaagctgcgcaaggagcttgcgttctgcacggaagaaacgctcgataaagcgctgcaaaagtgtattcccgcaagaaaagcggatatgctcggtttcaatagaaaagccttggagatcggtaaagcgcagtaaaattgaatttatataaaaagaacggcgcaggcttaaaatctgcgccgttcctttaaattgagagccaaggaggcggtctttatgaaaattctggcgtttacgggcgcgggcatcagcaagcagagcaacattccgacatttatggagcgacccgacgtgcgcgaaaagctgttccgcacgttcgcggagcgtcaccacgaggcgtataacgaggtcattcgcgaattgaaagcgaatatgaacggcgcggagccgaacgacgcgcattttgcactggcggaatacaaggtgccggtcatcacgatgaacattgacgggctgcataaaaaagcgggcagcgacgcactggagctgcacggcggcttgcctgaggacgacgaaatggacaaggcatgggcgctttataataagcccgtgctgtacggtgaccccgcgccgaactatgcgaaagcatacgaaaggacggctgaattaaagcccggcgacgtgttccttgtcatcggctgttcgtaccacaccgccatcgcgtgcgacctgcgggacgtagcaaagcacgccggtgcaaaggtcattgagattcaggaagacgccgcgcataatgtacggaaagtgttggaagaattgacaagaaagaactgaacagagatagaaaaagcgcgtaggctgtgaaacctgcgcgctgcttttatcggtcgaaataaacggttcaaatttgtgccgtgcgcttctctgcctgtcgtttttgaatcgccttggcggcaaagtaggtgaggagggcggcgagggtgccgaggaggatgccggcgaggacatcggtagggtagtggacaaaaagaaaaatgcgggagaacgcgatgagcattgccggaatgtacgcgagccagccgacttttttgtggcggagcgtcaaaataagcgctgcggcaaagcttgacgatgtgtggcccgaggggaacgaataggacgtggggcgtgcgatgagcatcggaaaatccgtgaacacgttgcacgggcgtaggcggcagatgatgtttttcagcgtcagctcgccgaaaagcagcgtgaccgtcatggcgataagcaccaaaccaccggtgcggcgcgtttttttaaagcagagcaaaacgagcgaaaggacgatccacccaatgcccgcttcgccgagcgatgtgatgatggggaagaccgtatcggtcacggtgttatgaaagtgcgtctgtataaaggccatgacggcggcgtcaagcgacgggatgccgggaaaactcatcttagtaaacctccaatgctttgattgagttatagtatactgcaatttttctaaaaatgccagtggatttctatgaaagaattctttcaaaattctaaacggacgcgcccgcgcatagaattaccggaaaagggggcaggaaaatgtcaaaacccatagcggaagcaaaattctatgccatgacggcggaggcggctgtgaaaacccttcaaagcgacgcggggcgtggactgagcggatccgaagcgaaaaagcggctcggcgtttacggtgagaatcggctgcaaaaggggaagaaaacgagcttcgcaaagaaatttatgctgcagttcggcgattttatggtgctcattctgcttatcgcgtcggcagtgtcgtttgccgtctcgtgcatgcagggggaagcgaatctggccgacccgctgctgattttgggcatcgtcattgcgaacgcgttcgtcggcacggtgcaggaggcaaaggcagaacgggcgttggaagcgttgcgcacgctttctgcgccgcacgccgatgtgctgcgggacggcaaacgcgcggtcctttccgccgaagcactcgtgccgggggacatcgtatatatccgcgcgggagacgtagtgcccgccgacctgcggcttttggagagcatgcatttgcaggccgaggaaagcgcgttgacgggggaatccgtgccgagcggcaagagtgcgaatgcggtatgtgacgaaacgtgcggcgcggcggagcgcaaaaacatgctgttttccggcacgggcatctctgccgggcagggcgtgggcattgtgaccgcaacgggcatgcaaaccgaaatgggtcgcattgcggcgatgctcggcgacgaagaaacgcccgacacgccgttaaagctgcggctgcggcgcacgggcaagctcatcgggcttttggtgcttgggatatgtgcggtgatttttttgattgggcttatccaaaaggcagaaccgcttgaaatgttcatgatctccatcagccttgcggtggcggcgatacccgagggcctgcctgccgtggtgacgatcgtcttggcgctcggcgtgcggcgcatggcggcaaagcgagccatcattcggcatttgcctgccgtggagacgcttggcagctgcgaggtcatttgctccgacaaaaccggcacgctgacgcagaacaaaatgacggtagtgcgctgcgcgggtgcggcgggcgagctgaacggacaggatagagacgctttgttatctgcggcggcgctgtgcacgagcgtggagggcagcgacgagaagctgctcggtgacccgaccgaaacggcgattgtcgcggcggtatcggactgggagcgtctgcaaaagcagcgcgtgaaagcggctgaggtgccgtttacggcagaacgccgccgtatgacagtcgtactgcgaacggagggcggatacagggtcatcacaaagggcgcgccggaggcgattttaccgcgctgcacgtatgtgcttttaaacgggaagaacgttacgttaacacccgagatgcgggcggcactgagcgcaaaaaaccgcgacatggcaaacgacgcgctgcgtgttctggcggcagcggaaaagcgcacggaagcttgccccgagacggacgatgcggcggaaagcgagctgtattttttgggacttatcgggctggaggatcccccgcgcccggaggcagcggaggcggtttccgagtgcaaacgtgcgggcattcgccccgtgatgatcaccggcgaccaacctgcgacggcctcagccattgccgggcggctcggcattgaaaataaatctgtgatgacgggtgcggagctggaaagcctttcggacgacgcgcttttgcagacggtgcagacgtgttccgtgtacgcgcgggtctctccggcgcacaaaatgcgcattattaaggcgtttcgcaggctgaagctcgtcacggcgatgacgggcgacggtgtgaacgacgcgcctgccctgaaagcggcggacatcggctgcgcgatgggcaaaaacggcacggaggtcgcgaaaaacgccgccgacatggtattgacggacgacaactttgcgacgattgtttccgccgtgcgggaggggcggacggtatacggcaacatccgcaagaccatccattttttgatgtcgtgcaacatcggcgagattttggtggtgcttgtgtcgtttttgctgcgcacgccgacgccgcttttgccggcgcaattattatgggtgaaccttgtgacggactctttgcctgcgctggcgctgggcagtgacccgccgcagggcgacgtgatgcgccgcccgcctaccgcgcgagacagcagtgcgttttcaaacgggctcggttttgcgatggcggtggagggtatgatgatcggcgcactggcgcttttggcgttcacggtgggacgcgtgttttttgacgccgatcccatgcagcccgccgtggggcgcacgatggcgtttgcggtcctaagcctttcgcagcttgtgcacagctataatatgcgcagtacggggccggttttgggacgcggcatgttcaaaaaccgggggctgaacgtatcgtttttgatttgctcggcatggatggcgggcgtggtcgtgtttccgcaagcggcggcgctgtttggctccgtaccgctgaccttgacacagtggggcatcgtggcaatccttgctttgctgcctctgccgatctgcgaaatgcagaaaaggatactttctcgcacggcaaaagtgaaaaatatgacttccggtgtgaaaaagcgagtcatcttcaacaaatagcctgttacttttttaattattagccgtcatattgacttccctttcttttttcagctataataagaaaaaatagcccacacggatgtgcaggccatggggtctgcgaaaatgaaaggggtcgatatagatgagaaaaaccaagatcgtatgtacgctgggtccttctaccgatgacgaggctgtgctgcgcgagctgattttgagcggcatgaacgtggcgcgcctgaatatgtcgcacggcacgcatgaggagcaaaagcgccgcgccgatatggtgaaaaagctgcgaaaagagcttgacgtgccggtcgccattctgctcgacacgaagggcccggagatccgcacggggaagtttgccgaaaaggtgatgctgacccacgggcagaagtacacactgacgacgaacgagcgcctcggcgacgcggaaggctgctctatcacgtttaaggacctgccgaaggacgtacaccgcggctcgcatatcctcatcgacgacggcctcattgaaatggtcgtggaaaaggtgacagacacggacattgagtgtcgccttttgaatgacggccccatcacgtcttataagggcatcaatgtgccgggcgtgacgctttccatgccgtatatcagcgaaaaagaccgcgcagatcttgaattctgcgtgaaggaagattttgagtttatcgccgcctcgttcacgcgctcggcagaggatattgtgatgatccgcaacgagcttgaaaaaaacaactgccgcgacattcgcatcattgcgaagattgaaaacacggacggcgtggagaacatcgacgacattatccgcgtttcggacggcattatggtggcgcgcggcgaccttggcgtcgagatcccgatggaggagatcccggtgctgcaaaagcagctcatccacaaggcgtatgtcgccggcaagcaggtcattacggcgacgcagatgctcgactccatgatcaagaatccgcgcccgacgcgtgcggaggcgaccgacgtggcgaacgcgatctacgacggcacgagcgccatcatgctgagcggcgagacggctgcgggcgcgtacccggtggaggccgtgcgcacgatggtccgcattgcggagcgcaccgaaaacgacatcgactacgtgcgtcagctggagcagtgggatgtgccggtgcaaaaggacgtgacctctgccatttcgcacgcaacgtgcacgacggcgcacgacctcggtgcggtggccatcatgaccgtatcgaaaacaggctttacggcgcgcatgatttcgaaattccgcccggcgtgcccaatcatcagcggcacgaccgaccgcaaggtactgaaccagatgggcctttcctggggtgtaatccccgtgatgctggaggaaaagaccagcaccgacgagctgtttgagcacattgttgcagttgcggaggagcacgggcttgtgcaggcgggcgacattgccgttatcacggcgggtatcccgctgggcatttccggcacgacgaacatgctgaaggtacaccttgtgggcgacgtgctcgtctccggcaccgttgtgaacgagctgagtacctgcggcccgctgtgcgtgtgcaaaacggaggaggaagcgctgcagaagttccgcaggggcgatattctggtgctgccgaagaccacaaacgcaacgatgccgctgatccgtcaggcttcgggtattgtgacggaaatggacggcgtgaactctcacgcagccatcgccgccatggcgctggataaaccggccatcgtcggcgcggcgcacgcgaccgacctgctgcgctccggcacaaccgtgaagctggacggcgttagaggtgcgatcttcagcgtaagtgcaccgggtgtggagaagtaaggcaaaaacgccgtagaacatagcgctgcaacgaataaagtctttagtcaagttttcttcgagaaaacttgcgggtgcgtagggcagagccctacgtcgctttccgcagaaagcgaaatctttttgcctaacgaaaaatcaggacgggagagtgaacagtccagtggactgttcactcgtgggagacccaattagggggtctcccgaagggcggctttgtgccgccctttttcatatacgcaggcaaaaaaatagcgccgtactctcggggaagaacgagggtgcggcgctttaaatagacggtcttttgaccgcctatcaggaaacccatgcaacggggtttcctgcggagcgaacgtccactggaagttcgctcctaccttcctggttttaggttaggcaaatgggtttcgcgctctgcggagcgcgcctcaggactttgccccgagaccccaccaactttttgaaaaaagttggatcaaaaactttattcgtcgcttcgctgtgcgttatttcaccgcttttataatcaaacaatcgttaccgttttccaccgtgacggtgaagccgacttcttttaacagttcggcttcgtgctcttttgtcagcgggatgtcgaagtggacgaatgtgtcgtcgggaatgctttctttgcggcgtttgcggctccacgtttcgcgcagcaggttttcttcttcgtcacagcaggcgaagtaatcgccattcacaagcatgccgccgggcgtgagacaatcatagatgcgtttgaagagccggcgctttttctccggcagaaagtggtgcagcgattcaaacgagatgacagcgtcgaacgcaccggggaacggcacggcaaagtagctgccgcacagcagcgtgaggtccttatccccatgctttttcatgagggcgtcgagcatatcgggcgaaaggtcaatgccggtgacggaaatatccgtgcgcaaattgtagagcgcgtcgagctccaatcctgtgccgcagccgaggtctaaaatgcgcttggcgctttgcggcacggcgcgtgcgaactgcttgtagtcttcgccccagaattttgtcatgcgcgcttcgtagtccggcaggcgcttgcggaaaaacgcgcccatttcttcaagcggggcgctttcgagctcgcgaagccaattttttaagtcttccaaatatttttctttgttttgtgcattgatgaccatgttttttctccaaattctttaaatgagaacaccgcgttattgaacgcagaatttgcgaatggcgccgcgcagcagctgccgcagttcattttcctccgcaataagtgaacccgcgtacagcgcttcggcgatgccgaatgtataaaatcgcacgtcgcgataaacggcttcggcttcctttacggtgagcccgtactgcaccgccgtgcagtcgatggcctcgcggttccacgggctcgagatgatctgcggcacggtgcggctgccgtattcgttcgataaaaacaggacgccgaacagattgcgcctgtcgcgggcgagcagaatgtgcgcaaggctgatcgtgaacaggtagtccgatttatcgagatactgcgcgacgaaggattgatatgtgccgtctaaatattcgatgacggcgcggcggaaagtttccatgctgccgaagttgcggaaaacgggctgcacggagcaattgagtttagcggcgacactgcggacattgagtgcatctgcgcctttttccagtgtgatggcggcgcctgcctcaagcagcatttccgccgtgatgcgcggtgttcttgccatagtttcctcccgggtgcggttcagctgatgaggataaaatatcgaatgttatttcatttgtcaagcgcaaatttgaaataaaacggaatttatttgaaatggggatatattgcaaagttttgcggcgcatgatacaataaattgaagaaaatcaccgggagggtgttctatgaattttcgggaaacgttaaaatcgatcgggatcatccctgttattcagatcaacgatgcggaaaaagcagtgccgctggcgctggcgctgaaaaaaggcgggctgcccgcggcggaggtgacattccgcacagacgcggcggaggaagccattcgccgtattaagatagaggtgccggacgtgtgcgtgtgcgccggtacggttttgaacgtaaagaccgcagagcgcgccgtgaaggcgggcgcttccgcgattatcagtccgggcacgaatccggaggtggtgcgctggtgcattgcgcaccgtgtgccggtcatccccggctgcgcgacaccgacggaggtggaagcctgcatgcgcatgggactcgattttgtgaagctgttcccggcggaggttgtgggcggcgtgaaaatgctgaaggccctcggcggtccttacggcaatatgaaattcatgcccaccggcggtatcagcgcgcagaacgcggcggagtatcttgcgctgccgaacgtgctgtgctgcggcggcagctggatggtaccgggggggctcctggacgccggagattttgacgccattgaggcgctggcacgcgaagcggcgcagattgtaaagaaatgattttgtaaaacgaaaaacaggacaaagcgcatctgaaaacgctttgtcctgtcttcttcatttatgggtgcggtgtgggcaaatccccagcgtgtcgcgcccgtataaactccccgttgtccttcatcccttttggatcggacactttcgtcactttctgacaaaaggtatcttatcacattcgcttccgtttgtaaagcccctttttaaacattttgcaaaaaagcagcagaaaagtttttatgagatttaggaaattttaaagggcgttgtctgtacatttcaaaaagaggctcaatgtttgaatttcaaagcctgacgcgtcagagagaagataccggtcatgtattcctcgtggatgtccgcctgcatacggaaaacgggcatgtggttttccgggatgctctgcttgcagtaatcgatgatgtctttttcgcgcacgttcaaggtggcagagccggtgaggaagaggatgtccgggttcaaaagcgcgatggtgcacacggcggcggtctgcatcagcggcacgatattctcgccgtgaatcatgcgcgagacggtctcgacttttgtagcggtggagttgatgagcggcagactgatgagctcgcccgcatattttgtactgccgacgatgatgtgtccgtccaccacggtgcccgcaccggcgctgcggtggctcggccagtagagaacggaaagcgagtatgggtggtcgcaggggttgcgcacgtaaaaaccgtaggacgtgaagtgcatgtcgttttccgtgatgaccgtgatgccgagctgttcttcgagtaccttcttcgggttgaagccgtttaacgccgggaacgcaagggattcaatggcgccttcgcggtcggtgacgccggaaatgccgatgccgactgcgcggatgagcggatctgcctgcaccatctgtgtgatgaacagcgtgaggtcctccggcagaatgtcgtcgagcgggcagaatttttcctgcaagctgtttccctttaaatcgcacacgcgcagggcgatgccgcttctttccgcgtcgttattatcggtatacagacacaaaatgtgcgcgtagttcgggttgatggaaaagcggcgcgcgggacggccgccgttcgatgcggcaaaggcgagttccagcacctgtccgtcgtcgatcatctcgccgaggagcgccgtacaggccgcaaggcttaacctgcattgctcggcaagctctttttttgtggcgaaatccgtgtggtacagcgcgctgcgcagagcggcgaggttattctgttttaaagcggcagcgccgccgtgttctgtcataatcgttttccttcatttctgttgcgggccgagcccgcatattttcaatacgagcctatattagcatataaaatgcacgatggcaatggatttatgttccgacaaaaataagtttccgggaattcatggatttttcatagacaatgcgcgaaaactgtgctatactctaaattactaatgtaacggagtgatcataacttggagcagaaagcttttgaactgatacaggaaaaattgcaggcagcgttaaatgagcagggctttggcgaagctgtgccgctggagaccgacaacggccgcggcgtgatgtttacgacgggcgaagtggcctacggccttttctatgagacgaagcagcggcgctttgtgctgcgcagcgcgacgatgaagaccccgaaggagccgggcgactggcgtcagctttccatgtggctgttcgatgaaggtgaaaacaccatgcaggacgcggagagcatcgcgaacgactttcttgagctcgtgcagggctctaagcgccgcgagctcgtgcagaccgcgaagaagcgccgcaagaaggacgaagagaacaacgcggatccgcagttctttctcaaccgcttggtgccggtgttcccggagctgcgcgacgaaatgaacaaggaacgcatcgtgtacggtcaggtgcgcacggcactgtttgctgctgagaaagttgcgccgaagtgcgagaatcttgcgaaaaactataaggacagcgagcccatgaagcgcatgtgcaccattttctgcgacatgtacgccgcgggtgatatggacacccgtgcagtcattcagttcggcgttctgaataatattaaggacgaggcggccatcaacaatatcatcgcgaactttacggacggctgcgacctgcagaaggtgtataagcactccagaaaactcatcggcaagaacatcaagcccgaaaaggaaaagaagaagggcaaaaaggtggaagcacgcctgagcaactgaaaaaccgcataaaatctcaaaatagctcttgacagcggcgtatatcctatgctattataggtatacctcaagttgggggctatttttttgcgcccaaattttgagggaggctgggagaacatcccaaattttttccgtaaaacgggaggtgccgtcatgagagtaaaggtcgttttagcttgcactgaatgcaaacagcgcaactacaacacaaagaagaacaagaagaatgatcccgacagacttgagatgaacaagtactgcagattctgcaagaagcacacgctccacagagagacgaagtaaagcgaggaacgaagttatggccgaaaaagcaaaaaaagaaaacggctttgttcgctttacgaagaaagcgggaaagtttttccgcgactgcaagggcgagatcaaaaagatcgtttggcctacgccgaagaacgttttcaaaaatgtgggtgtcgttcttgcgacgatcatcctgcttggtctcttcattttcctgctggataccgtcttcatgaatttgctgggtctcgtcatgcaagtggcgaaataagcagcgcgaatgatcgcgcgtttatttgagaagcggaggaatcgaaatgtcggacgaagcaaaatggtatgtggttcatacctattccgggtatgagaacaaggttgcgtcaaatctggagaagacggtggaaaaccactctttacagaatttgatttttgagattcgcgtacccaccgaaaaggtcacagaagttgccgcaaacggcaagaccaaggaagtggaacgcaagatttttccgggttacgtcattgtaaagatgatcctcacggatgaatcgtggtacgcggttcgcaatatccgcggctgcacgggcttcgtcggcccgtcttccaagccgattccgctcacggatgaagaagtggagcgactcggtgtggagacgaggaatgtcgaagtctcctacaatgtcggtgacagcgtccagattaccgacggcccgcttgagggctttatcggaacagtggaagagattgatgtggacaagaaccacattcgcgtcatggtttcgatgttcggacgtgaaaccccggttgacctggaacttgaccaggcggagccggtggaataacacacggtaaattgcggtaatccgctttttattgagggggatacgtccccctgtgggaggaacgcctgaattttcacggacgttccgccatcaaccacgaattttggaggtgcaaacaaatggctcagaaggttacgggctttattaagctccagatacctgccggtaaagctaccccggcaccaccggttggtccggctctcggtcagcacggtgttaacatcatggcatttacaaaggaatttaacgagcgcaccaagggcgacgctggtcttatcatcccggtcgtcatcacagtatacgcagaccgttcctttacctttgtaacaaagacgccgcctgcagcagttcttattaagaaggcttgcggcatcgaaacagcttcgggcacaccgaacaagacaaaggtcgcaaagattacccgcgagcaggtaaagaagatcgccgagcagaaaatgcctgatctcaacgctgcatccatcgagagtgctatgagcatgatcgccggtactgcacgcagcatgggcatcgaagtagtcgattgatttgattttacccgggtgggaggaaactctctgagaatccgatatctaccactttaggaggaacatgaatgaaacacggtaaaaagtatgtcgatggcgcaaagctcatcgagcgcagccgcctttatgatacgcaggaagcgcttgacctctgtgtcaagactggtacagcaaagttcgacgaaaccgttgaagtccacgtaaagctgggcgttgacggccgtcatgcagaccagcaggtccgcggtgctatcgtcctgccgcacggcacgggcaagaccgtccgcgtgctcgcaatctgcaagccggagaaggaagacgaggctcgtgcagccggtgctgaattcgtcggcggcaatgatatgatccagaagatccagtccgaaggctggatggattttgacgtcctcatcacgaccccggatatgatgggtatggttggccgtctcggtaagatccttggcccgcgcggcctcatgccgaacccgaaggccggcaccgttgctccggacattgcacgtgcaatcaccgaagcgaaggccggtaagatcgagtatcgtctcgacaagaccaacatcatccactgcccgatcggcaagatttccttcggcacagagaagctgacggaaaacttcaacacgctgctggaagccatcaacaaggcaaagccggctgctgctaagggccagtacatccgttcctgcgttgttgctgcaacgatgggcccgggcgtgaagatcaacccgaacaaggttggctaagattcgtctgaatcttaaatttaaggcttgacagagttcttctgccatgctataattacaaagctgtttacctaagacagcaggtgcaccggttttccgggctgaaaggttttaccgcctgccgagggagcggaaaagttactttgtactttttatgccttcctgcggtaagtgggaaggcatttttagttttcgcaccgaggaaaatcgttcattttggcgcttttccaaatcataactgaaaggcgaggtgaatattttgcccagtaaaagcgttttggaaacaaagcaggcaattgttgctcaactgaaggataaggtcgctaacagcgtatccggtgttgtcgtagactacaagggtatcactgcagaggccgacacaaagctccgtaaggaactgcgtgaagccggcgttgagtacactgtcgttaagaatactcttctcaagcgtgctatcgaaggcaccgagatcgagggtatgtccgaggttctcgaaggcacaaccgctctggctgtttcccacgaggatcagatcgctccggcaagaatcctgaacaagtttgcaaaggattccgacggtaagttcgttattaagtccggctacatggacggtaaggtcatgtctccggcagagatcgctgcaatcgcagatctcccgagcaaggaaggtcttgtccagatgctgcttagcgttctcgtatccggcccgcgtggtcttgctattgcacttagtgaagttgcaaaggctcaggaaactgcataagtttgcaggataattttcaatttaaaattttaggaggatattacaatggctgatatcgcaaagtttgttgaagaaatcaagtccatgaccgttctcgagctcaacgagctggtcaaggctatcgaagaggagttcggcgtttccgctgctgctccggttatggtcgctggcgctggcgctgctgctccggctgctgaagagaagaccgagttcgacgttgttctgaagtctgctggcgcaaacaagatcaacgttatcaaggttgttaaggaagctaccggcctgggcctgaaggaagctaaggctatggttgacgaggctccgaagaccattaaggaaggcgtttccaaggacgacgctgaggctcttaagacgaagctcaccgaggctggcgctgaggtcgaactgaagtaatttacttcaccttataattgtctgattcaagatccgcaaatgcagttcgctgtgtttgcgggtcttttttcttttcgtttatatggttttctgaaatataatttggcatctttgttcacaaaatagtcattgcttttttgtttttatcagtctataatatgttcattccttaacagttcaaaaatgaacaatttagttttgaactgttcttgaaaatgacatcgttgagaacttttggcgatgttcagcagtaagcaacaggaggtgcgaggaatgaagcaagacgagcaagcgtgtacggccgtgccgtttcacgatgggcttgcggagcacttaacgcagatcgcgcgcatcatcaatacggagctgcgcaaggtgctggcggatgaagacctttccgcggtggaatccggtgtgatcatgtgcctttccacaacaaaggtcgatacggccgggcgcattgcgcggcgcatgggtgtttcgcgctcgttgatgagtaaggcggtagaccaccttgtgcgcggcggatggattgaaacaaaaccggaccaaaacgaccgtcgcatggtacatttggttttgttgccgaaggccgagccggctgttaagcggtgcagagagctgaagcatgaatattatgaaaaaatgtgcgccggtgtcagcccggaagacatgcaggtcttccaccgcgtcatggagcaaatacggcgaaaccttgaaaactttaccgagacaggcagatacccggagatgagaaaggagaaaaccgaatgaaattgctgaaaacgtacctaaagccgtttgcggcgctggtgctggcgtgcattctgctgcttttcgggcaggcgatgtgtgacttgacgttaccgaacctgatgagcgacattgtgaacaccggcattcagcttggcggtgtggatgaggctgcacctgcggttttgaaccaacaggccgttgacttattgacgctgtttatgaacgacgcggaggcggggacgttcaaaaatgcctacacgcccgtggagcatggcagcgatgaagagacgaagcttgcgaaaacctacgagaatatcaaggacatggatgcggtggctttaagcgaagatgcagacgtgcaggcggtgggcgatgcctacggtaaagcggcgtatgcgttcatgacgttcctgaaggattacggcgcgcagaccggccaggcggtggacaccgaaagcggcgtgcaggacatggatatgcgtcagctttatgctgttatccccatgttacagcagatgccgaaagagacgttcagcgaagcgatcaattctgccgaaaacgcgcagtcgatgatcggctcgcaggtgggcgcaacgtttacaaagctgttctataaggaactcggcgtcgatttggacgcaaagcagatgcactacattgtgatgaagggtctcgagatgctcggcattgcgctgctcggtgtgctggcggcggtgctcgtcggcttcttcgcgtcgcgtatttcgtccggcgtggcaaagcagatgcgcagcgatgtgttccgcaaggtggaaagcttttccaacacggagttcgataaattttccaccgcatcgctcatcacgcgcacgacgaacgacgtgacgcaggtgcagatgcttatttccataggtctgcgtttgatgtgctacgcgccgatcatgggcgtgggcggcattattttcgcgctgcaaaaaagcgtttcgctaagctggatcatcgcgctcgcggtcatcgttttgctggggcttgtcgtcgtacttttaaacgttgcaatgccgaaattcaagagcttgcagcgtttgacggacagattaaacctcgtcagccgcgagaatttgagcggtatgctcgtggtacgcgcgtttacgaatgagaaattcgaggaggcgcgctttgataaggcgaatgaagacctcacccgcacaaaccgctttacccagcgcgtgatgagcattacaatgccgatcatgatgctcatcatgaatcttgtcacgctgctcatcatgtgggtgggtgggcatgccattgcggaatccaccatgcaggtaggcgacatgatggcgtatatccagtacacgatgcagatcatcatgtcgttcctgatgatttcgatgatcttcattatggtgccgcgcgccatggtttccgcagaccgtgtgcaggaggtgctgacgacggagctttccattaaggagccggaaaacccggttacactcggtaatgaaagcggtgagctgcgttttgacgacgtttccttccgctacggcaacgccgaggaagataccttgagccacatttcgtttaccgccaagcccggccaaacgacggcgtttatcggcgcgacgggtgcgggaaaatcgacgctcatcaacctcatcccgcgtttttacgatgtcaccggcggcgcagtttacctgaacggcaaggatatccgcacgctttctcaaaaggaactgcgcgataacatcggctacgtgccgcagaaggccatgctgttctccggcacaattgattccaacatcaagtacggcaaggaagacgccgacgtgaacgaggtgctggcagcgctcgattgcgcacaggctacggaatttgtcagcgaattgccgaacggcgtggaaagctccattgcgcagggcggcagcaacgtttccggcggccagaagcagcgccttgccattgcccgtgcgctcgtgaaaaaagcgccggtgtatattttcgatgatagcttctccgcgctcgatttcaaaacggatgcaaagctgcgccgtgcgctgacgaaatacacggaaaacgctgtcgtgctcatcgtcgcgcagcgcgtttccaccatcatgaacgccgagcagatcatagtgctggatgaaggcaaaatcgtcggcaagggcacgcataaagagcttttgaaaacgtgcccggaataccgcgagattgcggaaagtcagctttcaaaggaggaattggcatgagcgaaccgaaaagaaatgcaccgcgtccgcacgggcccggcagaggcatgatgcccaccgaaaaagccaaggacttcaaaggcagctttaaaaagcttatttcgtatctttccccgtttaagtttaaaatactcatcgtcgtcattttcgcggcgttttccaccgtgttcacgatcgtcggcccgaagatcctcgcaaaagcgaccgatgagctgacagccggcttgatgcgcatcattaccggcgctgcggagggcattgactttggctatattgcgaaagttttactgttccttgtggggttatatgcgttgagcgcgctgttctcctacattcagggatttacgatgtccggcgtttcggcgaaggtctcgtacaacatgcgccgtgccattatggagaagatcgaccgcctgcccgtctcgtattttcacaaaacgagtcagggtgacgtgctttcccgcatcacgaacgatgttgatacgctcagccagagtcttaaccagagtatcacgcagcttatcacgtctgtgtgctccatcatcggcgtgcttattatgatgctttccatcagctggcagttgacgcttgtcgcactgtgcatcgtcccgatttcgttgctgcttgtcggacgcattgtgaaatcctcgcagaaatatttcgtcggccagcaggaatacctcggcgcggtgaacggccacgtggaggaaatgtacggcgggcacgtggtcgtgaaggcgtttaacggcgaagcgcgctccatggagaaattcgagtgcgaaaacgaaaagctctataacgcgggctggaagtcggagttcctctccggcctgatgcagccgatcatgggctttgtgggcaatctcggctacgttgtggtgtgcattttgggcgcatctatggcggcaggcggcagcatgaccatcggcggcattcaggcgttcatccagtatctgcgcagtttcacgcagcccatcacccagatggcaagcatctcaagtcaggtacagcgcaccatggcggcggcagagcgcattttcaacttccttgatgagcctgagattgtcgaaaaaacaccgaaatacaccgtggaaaacagcaatatccgcggcgacatccgctttgaccacgtttgcttcggctacgaagacaccgacgagacggtcatccacgatttctccgccgatgtgaaagcgggccagaagatcgctattgtcggcccgacgggtgcaggcaaaacgactatggtaaaacttctcatgcgcttccacgaccttaaatccggcaggatctgccttgacggcaaggacatcacggagtttgcccgcggcgacctcagaaaagaattcggcatggttctgcaggacacgtggctttacagcggcaccatcatggagaacatccgttacggccgcttggacgcgacggacgaggaggtcattcaggcggcaaaagcggcgcaggttgaccactttgtgcgcacactgccggacggctacaacacgatcctcaatgaagaagcgacgaatgtctcgcagggacaaaagcagctgctcaccatcgcccgtgcgattttgtccgacagccgcatcatgatcctcgacgaagcgacaagctccgtcgatacgcgcaccgagctttccatccagactgcgatggataacctgatgcgcggccgcacaagcttcatcatcgcgcaccgcctctcgacaatccgcaatgctgacctcatcctctgcatgaaggacggcgacatcgtggagcagggcacgcatgaagaattgctcgcaaaaaacgatttctacgccaacctctacaacagtcagttcgagcacgcagaggaaagcgcgtaaaacgcctgtaaaacaaaacgaagctgtcttctctgacaaagagagggcagcttttttggtggttttgaagattgacaatcacctaaaaggacggctacaataaccgcataaagggggcatttgtatgttttgggatgaactgaaaaagaggaatgtgccgagtttaaaatcgcgcgcggagatgctggagcttttgcagcgggaggaatacggctgcttgccgaaggcgccggaatcgttcgtttggaaagcggagcccggcgttgcggataatttctgcgcgggcaaggcgacgctggaaaagctgacgtttcgggttgtggtaaacggcaaagatttcgtgttcccggtgtatttggctgtgccgaccgcagaggggccgcacccgttttttgtccacatcaatttcagaagcgacgtgccggaccgctacatgccgacggaggagctcatcgacaacggctttgcggtgctttggttcggctatgaggatgtgacgcgcgacgacggcgatttcacctccggccttgcgggtgttctgtatgaaaacggcaaacgcgcgccgcatgacgcgggtaaaatcgcactgtgggtgtgggcggcgatgcgctgcatggattacgccgagcacgacgagcggctggactgcgcaaagtccgttgtgtgcgggcattcgcgcctcggcaaaacggcactgctcactgctgcgctggatacccgcttcgcgtttggctactcgaacgattccggctgtgccggtgcggcgctgttccgcggcaaaaaaggcgagcagcttgacgatatttataggcagtttccgttctggttcagcgaatcgttcgggcagtatgtcggcaaaacggacgcgctgccgtttgaccagcactacctgctcgcgagcattgcgccgcgctatgtatacgtggcgtctgcggcgggcgacgactgggcagaccccgcgtccgagcttttgagctgctatgcggcggcagcgggggacaaggaggcgtttccctatgaagaaacgtcggaagactacgattttaacctgcacgcgggccgcatcggctatcaccgccgccccggtctgcactatttcagccgcgaggactggaaccggtttattgcgttttttgagggaagcagtaaggcgagaaaagccgagcggttataataagaagggcggcgtattgccgtcctttgggagaccccctaattgggtctcccacgagggaatagtccactggactgttccctctcccgtcctgattttttggaaggcaaatagatttcgtcgtctgcggacgacgacttagggcgctgccctaagaacccgcgacctttttgaaaaaaggtcgatcaaaaactttttgcgtcgcttctctatgaagacgaaaaatgcatacaaaaacggcgaaatcctaaacaggactcgccgttttcttatgctttactttaattcttgcggttgaaattgatgaggcagccggctttgacgatcttcttttcgtcttccgtcatcggggcaatgtaaagctcgatctcctttacttcatcgccgagcacatacgctttaatgctctgcatatcgccgtccatagcgtccaaaacgttcgggacgaggatataatcaccgatctcgaaggcgggttcattcttcatctggaacggcagcatgccccagttcatcacgttggagcggtagcgcttggtggcatactcggagcagatattcgcaaggccgcccaagacgcgctggcagcttgccgcctgttcgcgcgcagagccgtcaccgggcttcacgcagtaaatgacactgccgatttcgattgtcttttcatcgacgtcgggcaggatgtttttcactttcccgagtgcgtttttcagagtttcatcgctttgtgcttcgcccgcaagtctcgctttttcgagtgcacggacatcctttgcacgctgcacgtaaccggggtcgcggcgggagagtgtgaactccgcaagccccagtgggttggagcggtacgaagacgtttcgccggacgggatcaattcatcggtcgttgtgaccttatccatgatcttcgagcagacgcgcagcagaatgttctgcgcaagggcctcctgctccggccaatccttgatgttcgggccgtagatgagcttatcctccggctctgccttgccgaagccgttgtaaatgcgggcgcggtaggaggaatcatcgtagttgtattccggcacctcatagttgtccgcgtacttttcggcggaggtcaaaatgccgccgtttgccgccgttgccgcgatagaacgtgcatccatgagtgcgacggcgctcagttggcctgcgcccggcttggagccttcgcggttcgggaagttgcgtgtggcgtggcggatgctcagcgcgttattcgccggtgtatcgcctgcgccgaagcacgggccgcagaatgcggtcttcacgatggcgcccgtcgccatgaggtcggaaatggcgccctttgcgagcaggtccataaacaccggctgagaggacgggtagacgtccagtgtgaattcgccctggccgcactgcgcgccctttaagatgtgcgctgccgccatgacgttcgtatatgtaccgcccgcgcagcccgcaatgatgccctgctgcacctgcaaaccctttggggtgatcttatccgtcagactgaattcgatatccttgccttccgtcaagcgcgcggcttccttttctacttcgcgcaggatgtcgccgagattcgcgttcagctcgtcaatctcaaacgcgttgctcgggtggaatggcagcgcgatcatcggctttacggtggaaaggtctacatagaccaagccgtcgtagtatgtcacgtcggccggctttaactcgcggtaatcgtccgcgcggccgtgctttgcaaggtacgccttcgtgtcgtcgtctgtgcaccagacggaggtgagacatgtggtctcggtcgtcatgacgtccacgccgttgcggtaatcggtcgtcatgctcttgatgccggggccgacgaactccatgaccttgttttttacgtagccgtttttaaacaccgcgccgatgatggcaagcgcgatgtcctgcgggcccacgcccgggcgcggcttgccggtgaggtacaccgccacaacgccggggtacgcgacatcgtacgtgttttcgagcagctgcttgacgagctcgccgccgccttcgccgatggccatggtgccgagcgcaccgtagcgcgtgtgggaatcggagccgagaatcattttgccgcagcccgccatggcctcgcgcatgtactggtgaatgaccgccatgtggggcggcacataaatgccgccgtatttgcgcgcggcggaaaggccgaacacgtggtcgtcctcgttgatggtgccgcccacggcgcacaagctgttgtggcagtttgtaagcacgtaggggatggggaacttctccatgccggaggcgcgcgacgtctgaatgatgccgacgaacgtgatgtcgtgcgaggcgagcgcatcaaattttaagcgcaggttctgcatatcctctgcggtgttgtgcgcttttaaaatggaataggcaatggtaccctgttttgccgtgtctttttgataggtctcgggtgcagcggcttccggcacgatctctgtgccgttcacaaggtaaacgccgccgtcataaagctttaccatattcattcaccgaaacttccgaaggagcccggaagcgatcctttcttttagcattgcatggccgcgcagaaaatcctgcgcttagttgctttcagtatagcataataaaggcggatttgcaatttgcatttctgctttttcattttgttcaaaaacggttcagtcttccgcgatgacttttgctgcggcggagcccgaagcggtcttccaaatgcggatcatcgtcgggatgcggctttgcagttccgaaacgtgagagatgataccgacgacgcgcccgctttggcggatactctcgagcgcacgcatggcggtatcgagcgtgtcggtatcgagcgagccgaagccctcgtcgatgaaaatggaatcaagccgcaccgcgcccgagtagctctgcacgacgtccgaaagcccgaacgcgagggaaagggatgccaaaaactgctcgccgcccgaaagtgtctctacggagcggcacgtgccgctcatgccgtccaaaacctcaatgtcaagcccgccgtagcccgcgccgcttttgccctgcttgtgctgcaaggcgtagcgcccgcggcttaaaacggagaaaaagcggtttgcgctctggatggtctcgtcgagcatcatgccgagcacgtactgcaaaagcggcacgcgcaaggcgttgctgcggccggtcacgtaccccgcaagctttgctgcgcggctgtactgtacgtcgagcgcggcggcttcctccgtgtattgctgcacggcggcggcgctttccgtaatggtgcgcaggtcggagccaaagcgtccaagctgcacggaaagcgtctgcgtttcggtgctttttgcgtccagctccgctttgctttgcgggaggtccttttccggcgctgcgccgagggcatttttcgcttcctttgcggcgaacatctgctgtgcggcagcttttacggcctcgtttgcagcagaaagcgcgttttccgcggcgtggaacgcttcatcaagcgctgcggtctcctgctcaagcacacgaatgcgcttttgcatttcggccatctccaatgtgatttgcgccgcatcgcgtacggtgtccatgacgcttaattggcggcgcttttcttccaaagcggcgcggcaggcggcaagcgcggcgttgtggcggctttcgacctgcataagcgcttcgcgttccgctttgagtgtctcaagtttcttgtgtgcggccggtgcctgcgctgcaagcttttgtgcttcattgagcgccgtttgcgccgcagtgtaggccgctgtgagcacttcttcgctttctgtgatgctttttgcggcatcgtttgcggcgtttaattgtgcgaaagcgacctcgtgccgcgcttttgcggcggcggccgtctgctcggcgcggctttgctcctgccgcaggtcttcaagctttttgcgcagcgcatcaagttcttcttttgtcgtctcacctgcgcacggcacggcgagcacggggtggtgcaccgcgccgcaaacggggcagggcgtgccgtccgtgagccctgtggcgagcgcggcggcgctgttttggttccacttggcttctgccgccgagagcagcttatcctgccccacgacggtcagccgcgcggtgcgcgccgcgtcttcggcagctccccacaattttttgcactgcgcttcggctttggcggcgtcactgcgcgttttcaacgcggcaagctgttcgcttaagatggtctgcgtctgtaagagcgacgcgagccggtcttttgcggcatcggccttttcggtgaatgcttcgcctaccgcgatgcgccgcagcacctccggcagcttttggcggtcgtcctctgcctgcttttgcacggcgcgctcgcgctcctcctcggcgcgcagttcttttaaaagctgttccttttgcaggctgcgttcctgctccgcacgcagctgttcgcttcgttttaaaagtgtgtccttttcggcggtcagctttgtaagtcccgcgcggttctgctcggcgcgcgtatactgcgctttggcggaagctgcccgcgtttcggcggttttcagctgcgcttcggcatcggtctcggctttttggcactgctcaaattgcagtgcgcgggtgtattgcttttgtgcgagcgtcagtgcttctttcgcggcggcgagcgctttttcggtccgtgcgcattctgatcgaagcgcttccgtttgcacggcgagcgcctcggcggtctccgcgccatgcttttcgagcagcgatttcagtttcgtctcgcacgtttcgcgctttgcgtacagctttttttgccgctctgtaaatttcatcgcgatgcgttcccatagctcgcaggagaaaagcgttttcaaaatggctgctttttcggtggaattcgcgcgcagaagctgcatgaatttgccctgcggcagcacgatgacctgcgaaaattgctcggcggtgagggaaagcaggttttccgcgtagcctgtcacattgcgcgccgcacccgaagcggcaagcgcccagccgtctgccgtgcggcgcttgcactcgttttcttcctcggtgataaaatcgtcgctgccgcgctttttgcggcggtacagcgcgcggcggaagcaatattcgtcttcaccgagcgcaaaatgatagacgacctcggtacggtcgctgtctgcggcggcaaggcagcgcatatcttgaaacgtgcgccgcccgcccgtcgatttataaaagagcgcgatgctcatggcgtcgagcagcgtcgttttgccgccgcccgtctgtccggtgatgaggaacagccccgcttcgttcaacttttcaaaatcgatgacggtgtgctccagatacggcccaaacgccgaaagctccaaacggatcggtttcacgttgcatcgccctccagttcttttagaatttccgccagcagcgcttcgtcctccggctgcgcttcctcaccgcagacttcctttaaaaagccgcggaaaagctccgcgcggctgcggctgtgcagatcggcttccgcctgcgtgcctgcgtgctgctttaaaaaccacgcgctgcgcacgccgagtacattcgggtaataggggcgcagtcggtcggccgggcggaaaaccggctcgtcgtcggtgagcagaatttccacatagtcttcattgggcgccgcctgcccgttttcgagcagcgccgcaaacgtaccctctatgcgctttacgtcgtgcagaggggctacggggatgcacattgtttccaccgtgtcgccgagcgtgacgagcgtcatgctctttttctggtgcgcttcgtctacggaatacttgagcggtgagcccgcgtagcgcgccgtatcgcctgccctttgcgccgcgtgcagatgcccgagcgccgcatagtcaaacggggagaagacatccgtcggcacatcgcccgcgccgccgacgaaaaggcggctttcggaatcggaggtggaggcccccgccgcaaagcagtgcgcgaccaaaacgtgttttttcgcggggtcaaacgctttctccattttttctaccgccgcgcgcatacaggcccctgcaccgcgcagcgtttcatcgcctaaaaaatcgcgcatctgggcgttttcaaagtacggcagcgggaaaatcagtatgttgccgatctcgaccggcgtaaatgcgtctttaagctccgtaatgatatggatgccgtgccgcgcaagcaggcttttgcccaccgcaatgcggtccgggctgtcgtggttgccggaaatgatgacggcggggatgctccgttcgcacaacgcatcgatgagctcgtcgaataaatgaatcgcgtcgaccgaggcaatctgccggtcgtacagatcgcccgcaatgagcagcgcatcgggcttatattcatccagcgcaggcaaaagcgactgccgcacaaaatgccgctggtcgtctattaagctgcggccgtacaaaagcctgccgaagtgcaggtctgcaatatgtaaaagctgcatagcgtctccttttaaatttttagtctgacttttttctgaatttgccggcgagcaccttttcaggggtgccaaaccgtgctataataataaaatagttaacagtattatatcatgtccgttggaggataaacagtgagaaaacataaatttttatcgatatgcgcaagcgttttgctgtcgctttccgttttgacgaccggcgttttggccgatacagccggaagcaccgcgagcgaaacttccacagcttccgatacctcgacttcggaaaccgacacaacgacaaacacggtcgtggccaaaagcagcgaaatgggcttcccgtgcgataagctcacagacccgaacagcgcttctatttatatggtgagcctcgacaccgataccgttgtctatacatataatccggacgagcgccgccccatggcttccatgacgaagatcatgacgtatatcgtcacggcggaaacggtcagcgacctgcaaaacacgcgcactacggtgccgaaaagcgttgccgaggagcttgagggcacgggctcgtctttggcggaaattcaaacgggcgaaagctttaccatctatgagcttttgaacctgatgatggtgccctccggcaatgacgccgcgctgacgcttgcaaaatatgtggattctttgaatatcacggccgacgacccgcagtatgacgaagacggtgacggcaaaatgagctgtgtggagctgatgaacaagaaggccgcggagctcggctgcacaaacacgcattttgtgaacccgcacggcctgtacgatgaaaaccactacaccaccgcgcgcgagatggcgaccattacggagtatgcgctgacaatgccgtattttacggacgtcacctcgcagacgtattacacgcagccgccgacgaacatgacaagcgaggaacgcaccgtcaccacaacgaaccgtatgcttttgagctatgacgatgagtattacacctatgccaccggcgtaaagaccggctccttgaatgaatccggctactgcatttccgccacggctacgtatgacgggtacagttaccttgtcgtttgcatgggcagcccgtatatcgacagcgagggcaatcatatcgattatcacggcgaaatgtacgatgccgcgacgctgttccgctgggcatttttgaatatcgaaaacaaaacgctcgttacggacggcgagcttctcggcgaggtgagcctcaaatacgcgtgggacaaagaccgcctgcaggtgctggcgcagggcaatctcaccgcaacactgccgagcagtctggaaagcggcgccatcaccacaaagctcgatctgcccgaaagcgtgaaagcgcccatcaaaaagggcgattacgtcggtaccgccacattctattataacggcgcggagcttgccaccgttgcgctcgtcgccgcggaaagcgtggagcgcagcgagatcgtgcaggttttgcagcaggggcaggaggtgctcacctccacgtggtttatcgttacggccatcattttgctggtcttggctgccgcgtatgctatccttgccatcctgatgaaccgtaaaaacaaaaaagtccgccgcgtaaagaagtacagagatttataagtacagaacaaaaccccgatccgtttcatgtgcggaatcggggttttaatgttcacagagcgaacaattcacttgccgtaaagcgaatttcaccataatctccctacgttctcacctgccagctcggtcggagttgggcagtcgccatcggtttgtttttagtgaaatattttgctgacgcaaaatgtgaaataacgcttcgcacacaagtgtgctgtgcattgtgatatattgcgtcttcgccgcaatatgaaatgaaataaatctcctcacgcccgcaggcatttcacaacaaccgaagattgttcttttacgtgcgaagcacatttcacaaatctctaagagatttatttcacgccaaaggaaaaacctcattcgtttgaatgaggtttttcctttggctcgttgcaccgaaaaagatatcactcaaacttgaaccgatttccatgcgaaggggagtaaatctttgacatcaacctttaccactttattgttttcatcatttaatatgaccttaatatcgggacagtattctataagcatttgacggcagttaccacaaggcgctaccaagcaattcggtgctttatcgtgaactgcaacaattgtgtcaaaatttctttcgcctgccgaaattgccatacctattgtaatgtattctgcacaagaaccgtgtataccgtcacagtttacgccgctgtaaattttgccgtttggacaactgagtgccgcgcctacagtgtggtgataaattccatcatcaaaattattttgtaaggtgttaagagcaacttttataagttctttgtctttatcggtaatttcatagaatttcatctgataacgctacctttttcgagactgagtctgcaatcttttgcataactatcggttactttaacccgaaaacgctgtttattcatctgcagccttcctttgcggtattaagcgaggaaattaacattcttctgattgcaccgcattggttttgcaaatagtagtcaccaatgccgccataaaaataggggcctttgtatttgcttttcagccatgacttgaagctgatgttcggctcatagtcatcatcccaatacagatcgtccagctcttcatcgggaaaccggaaatagatccccgccaaactgcaccatcttgcaaaacttcctcctgtcagttctttgaatatctgttccggaaactcataatgatgcaggtggctgttctgccagccaaacagtttctgaatggcatagtgcagagcgtggagggtaatgtccgccgggacaatgatatctcttgagatagatttttccactttcccatacttgtgcaggatccccatgtcctgtgccgaacaaccctccagatccaattcaagatgcagttttaaggcgatgggatgcttgtcccgctgcctgctcaggaattcgctcaggtcatcttcacggatgtattcttttggcacatcggaagaaggctttactgccttatcggcggcagtctgcttcctctctcggtacttcctggattggagagaatagctgctcttttcttctgcaccgtatgcaccttttgtgtacggagagaatgcctgaacattcttttccgtatagtggagcttctccgcgatctgttttgtatcaagcccttgttcccgcaagtcctgaatggttcgactcgttgcgctgctccaaagcccttccgtgatcagcactcggcgtaccttgattacgctcgtccccaattcttcggcagtctttttgacagagccgtttcccttgcaagaggcaatgatcctatcgtatagttcagcgtttctcatatctgcagcctctctcatatcgtggcaacctaaccacttttgctctattgtacagggtgcagatatatcctgtcaacctaaccttttgctggaatctgctatcagagggcaagatactgaccgcccattttaagcgcgtgcagactcactcacaggtatttcgacgatctgcttgtcgaattcggtttcggtcatacacttttctgctttccacaattcggatggtcggcttgattccgttccaggagctgcgcttatccgcatgaaatttccgctgttcccgcttgctttgtttctcgagaggtatcattttcattgatatgtgcatctcctttcgcttcttccaaatgacgcatcatcttttgaacttccgcttcgtactccggataaccgcagaggatcattttattcttaagcgcatcaagggcagctaagaacttggcgctatccttcttcttaacatggcaaagaatcgtcaggaaaggtgacccttcctttgcatactcctgatcaaaccacacccgaactatctgtttaataaatagctgatccgcaagatgttcaggggtgtcgaagaacaggaagtagtcataccgcaacgatggttttctgatttttaagtacatatatttcttcaaaatcgtcctctgtgcaaatttcctcttgatttttcgcacttcctctgttattatataatatcacacgcatgaaggaggcgttttctatgtctgtaaaagcatttcctgtgattgaccttgtggccacgggagataacatccgtcgcttgcgtatggagcgtggcatgaccgttcgagacctgcaaaactatttcggttttgaggaaccccgagcaatctataagtggcagaaaggtgaaagccttcccactgtagataacttgtacgcacttggaacgctctttgaggttcctatggaacaaatcctgattcccgcccaaggacaactgcatatgtttggcgagcagcaggctgagtcctgctgctcaaatcatttttccggccattttggatacggcaagagtccaatgcaacttcaaccatttgtcccgtttgctttgttggcagcatgacaagtcatgcattcaacgccgctcctgggataacagacaatgatctgtagttgagcttgtaacaagcaagcatgtattagaatcttttccattgagatgtaagtgcgaaatcaagaaagtgcgaatagcgaaagaacgcttctctcataaggatgtactgacggggttggaatagaagagtgacttccaatctttattgaggctcttaggtgagccgatctgtaccatcctttcggaaatatgcagcattatagttcatctgcacctgaaccggtatccgtattctctttatcttgccgcacccaaaatagccggactgagccggagcgttacgccccggctttctccatgaagtgttcgaacgcatctgcaaagctgtcgttcacatcaaagggcggttcgtagtccaccgtggatgtaacgaggcacaggtcgagcttcgcggaggtttcatcggaagccttgttcagcttgcccagctctctgcggatgacattccggtcatagttgatggtggtaacccgcttcacatcgcagcgataggaaatctgatttccctcagcgttaaaccggtatccggttcctccattgggaatgatctgctcagagtttcgcagatcattcatccgcttaaaagtgcgggcaattgactgtcgggcggcattgaggctgacctcgctgtccatgtcgatgtccagcgcatcctttgcttttcggattgcagcgaacagagcctctttctcgccgagcagatacaacagaaattgtgcaattccggtgatctgctcgtaatactccgtatccggagtaatgactatcgtctcatcttcggcttctgccatgaccttgtggcgcagatgggtattctccacctttgtgacattggaatcacgatccaagatttcctgtgcttcatccataaaggactggagcttgttctgataacggaatgcttctttcagattcattttcttctcctcgtcatattgatttctatctgttgtgattataaagttcttttggccggatgtcattgaacctgtagttcactctatcacggctctgaatagaactctcgcatatcatccaggcgtagacacgagagccgtccgtcctcgaatcctgcgccgcagtcaatgccaatggcgttgtcggttttccagatacacaatggctctttattctggaaatagcaggtcggggtatgaccgaagatcagcatatatccctcgggaatgggtttggttttactccatctttcccatacggcaaactccctctgatccttgtaatctcggctgcaccaataggaagtcatatagtcctccacaggagatgcatggacgaacttgtatttgatgccattgacggtgacttccatgttcaccggcaactgccgtatgaaacggaagatttcggcacgagcatcatttctccgtttcttttttgcttctaaagccgattgacaaactatcaccacaatgatacaatctatctataccaccacagtgttataggaggtgccgctgatgagcatcatcaatttgcttcatggaaccgaccacatcatcgaggttccggatattcatattggaaatccgcacaacgactatggtatgggcttctactgcacacaagtggacgagatggctcgtgagtgggcttgcaaaaagaacacagacggttttgtcaacagctatgcctttgacacggacgggctggaggtgctgaacttgttggacggaacgcatacggtcctgaactggatggctcttctgcttcaattccgcaccttcaagctggactccgaagttgccgttgatgcaagggactatcttattgaccactattcaattgatttaaccggctacgatgttgtgatcggctatcgggcagacgattcctatttccagtatgcagaatcctttgtgtccaacaccttaccgctcagaagtctgaacaaggctctaaagctgggcaagctcggtgagcagacggttgtcatttctcaaaaaggctttgatcggctgcacttcgtgaatgcttatccggtcagcaagagcgtctattaccccaagttcttggatagagataccaaagcgagggatacttaccgtaaagagatcaagaaaagcaagtcttaccgggacgacatcttcgtgctggatatcttgagggaggagatgagcaacgatgacccacgcatacagcgaatcttatttgaataatgccaaggatcgtctttcctctttcttcgactatgcaatcaacgactgtaaattaaaaccggattggatcacagcactcttcatcaataccggctacgccgaacaatttgaacgaggcaaccccgcctatgtcgcagggatgtccggtgttgagctggcccgtgcggtcatcacaaaggcatacggtccaaaggagctgccagcaccaaccaacgcagaggactgctcccctgaatattgggccggttgggcagttgcagagtaccaatggtttaccggccgtcgtttcaaggacatctttgagcgcattccactttccaagatcattgggatgtattccgtttaccacgagatggacattacaagtttcatcgataccatggaggaactctataaagcagcggaaggcgattccaacctgaagcgcatccgtgaaaaccggggcttatctcaggcagagcttgcagagcagtccggcgtgaatcttcgcaacattcagatgtacgaacagcgggtcaatggaattgacaaggcgcaggcaaacatcctctacaagttgtcccgtgttctcggctgcgatatcgaagacctgttggaaaatcccatgatgtaatttcattcatgcacctgcttcggcaggtgcatgcggtttctaaagtttatcagaaattattggaggaaccatctgtatgaaaaagcttcttataaataaaaagaatgtcacgctcgttataggaattgcggttgtgatgccgcttctttccttgatgaatgtccagatgtccgttcaatttggcgctgtgatcgaccgcatgcaaatcacctcggtttttatccgttctctcttggcacttattgtaattacggccctgacgtattttctagacaaaatactcctgtcgttttttctcacgcgcttgtcgtgcaactttgtgaccagtctgcatcacgcgttgatacgcaaatttcacacgatgaattatccctcttttttaaagagaaatccgacaggccttttccaaatctgcagcaaagatatctatgatattcaggaattctccatcgagagaatcattcgttttatcattagcttaaccacgggtctgctggcagccgtggaacttggctcgatcaatatcatttatccttttaccgctgcgtttatctatgctttttccgtgatcatagcgaagccgataggcagaatgagcgagcgctattccaacaacattcgggaaagtgaaaaaaggcttacgcgtgtcttcttcgacttggtcgaccactttacgcttcttaaatccttcgggagaattggcgaccggatccacgctttcgagcaggagaacaatacgttcaatgaaacgaccgtaaggtcgaagatatgcctcaatttttataaaacgctgacccgcgtcatcaattcggttgccccggttctgattgtttgcatcagcatcccgagctttgcctcgggaacaattacggccggccagcttgtaacggctgtcagcctggtttcgaccctctgcgttccgatccagaattttggcgatatctatctctccatcaaaaagacatggtttaagatcaaagagatcgacgaggtgctctgcgaaaaagacgagcagcagatggaagtgagcgaaaatctgctgcatggggatatttccttcaacaacgtaagttacagaatcaacgatgtgaatatcctttccaacgtgtctttcactatcccgtataaaaagaaaactgcgattgtcggaaaaaccggaagcggcaaaagcacgaccatgagtctgctatccggtttgctgacaggcacagaaggcagtttgtttgtgggcggggagcggatcacggagtccaatcgggggacattgctgaaaagcgtttcctcgatcccgagcactacatatttggtgaacgacacgcttcggaacaacctgcggctgggtgaagtcaacagcggggtgctggcgcaggtgatcgaaagctttgggatggataagctggccatgaacctgcccaatggatacgatacggttatcgggcctacgggcgtgcagctctccggcgggcagcaaaagctggtcggccttgcaaggggcctgtctgtgaaccgaaactttttcctgctggatgaagtgacgaccgggcttgatgatcatgcggtcgaaaaggtcatgccctatctccttgaaatggaccagacgcttgtattgattacacacaacctgaagtacatcgaccgcatggaccatatcattctgtttgatgatggccgtgtagtcgccagtggaacatatgatgaaatttcaaaagtgtggggtgaacttaatgaagcgtagagatgtatatttagagctgtttttccataaagcaagattccatattccgaaagtaattctgtccattctttccggcgtagttagaagtacgctcatgctgctcccgacaatgatgctccagagactgatcaacagcgtaacaggcgaccaggcacagtctgccaataccgctgtttacggcgttctctatgttttgtgtccgttgatcgttctggttctgtatgttcttgatacatggttgagtcgttttgtatatgatatcattaaggaaatccggctcgataccattaaaaaggtagttcagcagcctacgcgctgggtttcagaaacctcgcatcaggagatctataataaaatcatccacggttctcttgttattgcagatttctacttctccacgctgagcaacttggtttggtacacaaccaccatcgttgtgggcttcatattcatggctcagatcaacgcccccatcgcaatactgctgatcgccgtttccattttccagatttttggcgcgcagctcctgaaaaagcctgtggaaacagccaaccggcaaaagaatgaagcgctgattgaaggcagctctatcgcctcggattcgatttattcgagcgcgtatttgcgtgttctcggattaggggaatacgttgagcaatcggagtccacctggcagaagcactacaccaaagctgtaaataagatgttttcgatgaacgcgttggccgatatacagacggcgctttgtgagattatccggatcgtcattctgcttgtgttttcgcagagaggggttcagtcgggcgagatgctggttggcgacatatacgcaatgaatgcgtacattttgtggcttaccccggttttctttggaatccagagatggtttatcagcctgtttgtatccattggcaatcaaaagcgcatggacgacattctgctgctgccggaacggaatcaggaggaagccggaagaaagtgtgaaaacgtcacttcgctggaattggatgatgttaagttccagtatgaagagaccggaaaatgcttattcgaccatctttcctatcggtttgcttccggcgatacggttgtcatccgcggcaactcaggatcaggcaagacatcgctgctcaaattgctgctgagatttgaaaaaccaacagcgggtgaaatcaaaatcaatggaaacgacattgaaagttacgatgaacgcagcttccgcgagcaggtttctgttgcaagccagagcacggaatttctggcatgctcgatacgggataatctgcttctttccggtgcaaatcacaccgacgatgaaattatcgaaacattgagcttgctggagctggataagctgattgaaaagctcccggaaggcttggatacgatcgtgagcagcgagacagtagccttttcggatggagagaaaaaacgaatgggcattgcgcgtgcattgctgtcgaatgcatccgttctgattttcgatgagccgacagcctcgttggacaacaaaacaaaaggcccgatcatggaatccattcgaaatcagtgcaaaaaccgcatcctgatcgtcgtcacccatgatgaaaaaattgtgcagccgacggatattcagattaacatcggggcgtgattcagattgtagatccgatcaaataacccagatgaatgttggaagatcgatctatgaaactgccggaaacttctgcgcttccgacaacggggaaaagggtggaaaacgcaaaaaagcggggcttccaacctggaaaatcaggcggaagccccgcttctactcacaaaaaacctctaatttgccctttttgggaaaaggcatctatgaaaaatcactttgaattttgggctctaaaaggcccgaaaacccgcatgaatactgacaaaaatagggtggacatctaaagtgtccaccccagatggtccggaagcgtgatacggaagtgtgagcaacactcaaaaacacattgataattctacatttttacggcatagacgcacgggtttattacgaaaaagtaatccgcctctgtatcgaacaggggcggatttgcttattggtcatacggtactcggaaatagtccaaatacttcttaaatctgtcctgtgcagatagacaagtatcacgcaggtagccacgctcgttctgccattccttcaagcctcggtagtagaacatcttgatgtcgtcctcgatgataaacggcacgatgttgttccgcaggcattctttgaaaaggagtaggcgcccgactctgccgttgccgtcctggaacggatggatgcgctcaaagcggtagtgaaagtcaagcaaatcgtcaaaggttttgctctcaatggcgttgtattcagcaagcagtttcttcatctcagcaccgacattctccggtgcagttgtgtccatgccgccgacctcattgggcagtctcttgtaatcaccgacggcaaaccaatcgaggcgtgaatcggaagttccgtttttcagaacggcgtgcagctgcttgatgaacgcctcgctcggagcataattggcattgtcgatcaccatatcaatgcacttgaaatggttggcagtctcgaccacatcgtcaactttgaccgtcccgtccgatgcgccgatggtgttcgtctcaaagatatagcgcgtctgatcgtgggtaaggtgactgccctcgatgtggttggagttataggtcagatcgatttggattttatgataaataccgccgtgcagcttcgccgctttttcggctttcagcacctcaagaagggtctttggtgtatcggttttcttgttaatgcgatcgggcttctcggcggtttcgggtatgttccatgtcttgccggtcagaaatgcaccgacgatttttccttcggcgcagtaccctcgcacgctgcgttcggaaacgccccaccttttcgccgtttccgcgacagaaatatatttcatagagatccctcactttctgcacagggatagtatagcacattgtcggcaaaatatcaagatttaatgatgaaaaaacattcggatttcgccgatagcggcaattatacgcaaccgttaaatcagccataacatttttgtacctattaaaagtttgaaattcttatcatattattgatttctcggtcgaatcgtgatatgctatattcatgttattgtacccgacgccaaatagcccataaaggagattcaaaatggctgttagttataagaagctgtggcatattcttgttgatcggaatatgaaaaagaaagatttggaagaagctgccggcatcacccattatcagatgtacaagctggcaaacgataaggatataaccaccgacgtgatcggcgcgatctgtatcgcgcttgatgtgagaccaaacgatattatggattttgtcccggaaatcgataagtaacatgaagggccagtcatgtcagaacaaatagtttgttctttggataaatgctgtttctaccaaaggagtatatgaatgctacacaacggactttacgagcaaatcataaataagggtctggatacagaactttccgtaacggacaagctctctcaaactgcgcctattgatagtgcggaagcgtctaaagtattctcaaaatatgttgccgagatcgttgaaaaggggctaaacaacgtgaaagacaatggcggcaatctcacttctcaggtcgagcttgtcaaccgcattgtgtccaccattatgactgaaacaaaagaagctgacttcgacacgctttccgttgcagagcgtgcggagcagcttcttgcactttttgataagaaaaacaatgtgctggcactggacgaaagggccgagatcatccgtccggaaacctccatcgcacaaagctcacttttcaccggggctgtgcatgagccgcagatgtttaccgagctcaaaaaggaaatcgtctcggccgaccggatcgacatgctggtgtcctttatcaaatggagcggtctgcggcttatcatggacgagctgcgagagtttacgcacagcggcggcgagctccgcattatcaccacttcctacatgggcgcaacagatgtgaaggccgttgaggagcttcgaaaactgcccaatacgcacatcaaggtcagctacaacaccaagacgacccggctccacgccaaggcatatatcttttaccgcgaaaccggcttcacgacggcttatgtgggctcgtccaacttgtccaatgccgcattgaccagcggccttgaatggaacacaaaagtaacgcggcgtgacctgcccgaaaccattgacaagatcgccgctacctttgagtattactggaatgaccgcgaatttgaatactacgcggaggatcagcgagagcgcttggcacgggcactgaaggcggaaaaatatttcgacaccaacaatgccgatgtctacaccatggacatcaacccctattcctaccagcaggagattttggacaagctggaggcagagcgcactgttcgtggctatacgcgcaatctggtggtggctgccaccggcaccggcaagacggtcatctctgcactggattacaagcgcttccgcaagcagaatccggatcgaccctgccgcctgctctttgtggcgcaccgggagaaaatcctcaagcagagcttgtacaccttccgcgccgtgctcaaggacgtaaactttggtgagctgtttgtgggcaactataagccagagagcatcgacaacctgtttttgtccatccagaccttcaactcacagagcttcacggaaaagacgagtcccgatttttacgattacatcatcgtggacgaattccaccatgccgctgcaccgacttatcagaagttgttgtcctactaccagccgcgcatcctgctgggcttgaccgctactccggagcgtatggacggcaagagtatcctgccatacttccataaccgcattgcagcggagatccgtctgccgaaagccattgatcgaaagctcctgtgcccgttccaatattttggcgttaccgatacggtggatctggatgcgctcaaatggtctgccggtggctaccaaaagagcgagctggagcacatctacacgttcagcggggcggttgccgaccgccgcgccgaccatgtggtgacggcgctgctgaaatatgtgacggacattgacgaggtgaagggcctcggcttctgcgtgacggtcgatcacgcggaattcatgtgccgctactttaacgaccacaacattccgtctatgtgcctcaccgggcaatcttcggacgaggaaagagcggcggccaagcggcgcttggtgtccggcgatgtgcggttcatcttcgtcgtggacatctacaacgagggcgtagatattccggaagtcaatactgttctgtttctgcgccccacagagtcgttgacgattttcttgcagcagctgggacgtggtctgcgtctatccgaggacaaggaatgcctgaccgtgctggacttcatcggtcaggcaaatcgaaaatacaattttgaagataagtttgcggcgctgctgtcgaatgccacccgcagcgtgagccgggagatcaaggacggttttgtgtccgttcccaagggctgctatatccagctggagaagaaggcggcaaaatacattttggagaatatccgcgcgtcctatggcaatacggctgggttggtggctcgtgcagcctccttcacggaggacagtgggctggagctgacgctcaaaaacttcttggattactaccatcttgacccacgggcgatctacaagttttcctccttctcgcgcatttgtgccagagcggatgccatcgaggacttttcagaaccgctggaggatgttttgaccaaagcgtttgcaaagcttgctgtggccgactcccgccgctggatttcgttcctgttggacatccttccgcgtttggacaaccttgattttacagcgcttccggatgcggacaagcggatgatgcagatgttttacatcaccgtctggggcaaggctgtggaggactgggacgacgaagaggtgcttaataatctctacgccctgtctgacagctcggttctgcttggcgagctcttggagctgctgcgctatcgcttcgagcagatcgactttatcgacgagccggttgatctgggctttgactgtccgctggatctgcactgcacctatacccgcgaccagctcttggtagcgctggactttgtgaaaccgtccaccgttcgtgagggcgtgaagtggctgccggagaaaaacatcgacgtgttttttgtgacgctgaacaaggcggacaaggactattcgcccaccaccatgtacaacgattattccatcaatgagagcttgtttcattggcagagccagagcaccacggcggagaattcgcccaccggccagcgctatatccaccacaaggaacgcggcagtaaggtactgctgtttgtccgggagtttaaggcggaccgtatgaccggcggcgcggaggcgtacacctatctgggcacggcaaactacgtgaagcacacaggcagcaggccgatgaatatcacctggcagctggaccgcccgatcccggcgaagttcttgaagaagacaaataagttggtagtagggtaaaggagtttttatgaagtttattcacttatcagacctccatttagggaaaagagtaaatgagtattcgatgcttgaagatcaagaatacatactcaaaaaaatcatcaatatcgttgatgctgaaaagccggctggtgtgattattgccggagatgtctacgacaaatctgttcccgcggcggaggcagttcagttgtttgacaactttctcgttcagttggccaaacgaaagctcgaggtattcgttattagcggaaaccacgattctccggaaaggattgcttttggttctcgcattatggatgccagcggtattcatatgtcaccggtttataatggaaagattgtacctttctctatgcaggacgaatacggtacggtggatgtttatatgctgccgtttattaaaccagctcatgtccgcaggttttgtgacgatgaaattactacttacacagatgctataaatagcgtcatttcaaagctgagtatcaatcatggcaatagaaatattctggtgacacatcagtttgttacgggttcgttgcgctctgaatctgaggaaatctcggttggtggatctgataatgtggacgcttatgtttttgatccctttgattatgtcgcacttggacatattcactcgccgcaaaattgtggcgcggagcatattcgttactgcggaacaccgttgaaatattccttttcggaagcaaaagaccgcaagtcggtaacagtgatcgaactcgctgagaaaggaaaagtgtcatataaaacaatcgaccttgtcccgcagcatgattttgtcgagttgaaaggaacctacgatgagttgaccttcagatccttctatgagggtacaacatggccggaagattatacgcacatcacgctgacggacgaagaagacattccggatgcaatcggaaaactgcgcacggtgtatcatcggctgatgaagcttgattacgataatagacgcacacgctcaagtgtggagatcagtggtgcaacagacgttgaatctaaatcgccattagagctcttttctgatttttatgaactgcaaaataatcaacctatgaatcctgagcaatttgagtacatgaagtcgctaatagaaaagacatgggagggtgaacaatgaggcctatcaaacttacagtatctgcgtttggcccctatgcaggaaaaacggttcttgatttggacaagctcggagaaaatgggctttaccttattactggtgatacgggtgccggaaagaccacgatttttgatgcgattacttatgcattgtacggagaggccagtggagacaaccgcgagccatccatgttccgctcaaaatatgccgaggcaactactccgacagaggttgaacttgtcttctcctacgccggaaaaacatacaccgtaaaacggaatccagagtatgaacgtcccaaatcccgcggcgaaggatttacgacgcaaaaagcggaagtgcagctaaaatatccggatgggcgcgttgtcacaaagcagcgcgacgtggataatgcaatacgagacatcatgggcattaaccgtagccagtttttgcagatcgccatgattgcacagggggattttctcaaattgctgcttgcccccacagaggagcgaaagaaaatattccgtcaaatattcaaaacgcagttgtatcaggacttgcaggatcgtttgaagaaggagtccggtcaactaaacgacaaatgcgatgccgctcgtaacagtatcaagcaatatattgatggaattacctgtgatgaaaatgatgtcctgagtattgaagttgaaaaagcaaagaacaggcttcttcctgcaaaggatgttatggatctgattgatcgtctcctgacacaagataatgacaaaaaaacggctattcaaaagtcaatctcggatgcagacaaagccctcgaaatcgtcaatgcaaatttgggtaagattgaagcaaaagaacaaactcaaaaagcattagaccaagcacagaagaatttaatcggagaaaatgagaccaatcttgcgctgaaggctgcttttgatattgaaaaggggaaagtatcggaaagagaacagattgctgaagaaaaggccaagattgaggctgagttttctcgttatgaagcgctggatgccctagaaaaacaaatcaaatatgacgaggatactatttccaaaaacgagaggcaactgaaaaaagaccgggagcagtatgccattgatgaagcagagtttaaaatccttaaaaaagagttcgagtccctttcagacgcaggggaaggaaaggaaaagctttctcgtcaaaaagagaagacacaagaaaagcaagcaaagttgcaaaacctttcagcattatttaaggcctttcacgaacttggtgacaatttggatactctccaaagcgattacaaaaaagcctcggagtcatccgaggaagcaactgccgattatgaagcaaaaaaccgcgcatttttggatgagcaggctggaatcatcgctgaaactttggaaaacggtaagccctgccctgtttgcggatctttggaacacccttgcatagcgcataaatcggccaaggcccctacggaagcacaattaaaaagagcgaaagagaatgctgataaggcacgaaaaggagccgaagacttaagcgggaaatgcaaggaagccaaaggcatactcgatgcaaaaaaagccgaaacggaaaagctggctaaggaattatggcagagcgtcacatttgaggacgtggaaaacgatcttccggaggagcagaaagtcgtttctgcagaaatcgctgcgcttgacacagcgctttccgaagaggaaaagaaagtatcccggcgttctgcactttcagaatcgctgcccaaaacagagatgtctctggcggaaagagataaggatattacagctcgaagcactgctttagaagctgatagagcatcgttgagtgaaaagaagaatcagcgtaatgcggctaaggaatccttgcgctttgataacatagcagaggcgcagagaaaatcggaagctttgggaaaaaccgtcagcgaaatgaaggaagcatacgacaacgcgcagagtgcgctgtccgactcggataaaaaaattgccggctataatgcttcgattacggaactctccaagcagctctcttccgattgtgatctcgacaaagaagcggaaacaaagaagaaagcggaactatccgaaaagagaactgcggatgacgatgctgccaaagcacttcatactcacatagagtccaatacaaaggtgcttgctaatattcaagcaaaggtcggagatcttgatgctcttgaaaagcgctatacatggctgaaggcactgtcaaatacagcaaacggcaatatctccggcaaagaaaaagtgatgttggaaacctatattcagatgacgtattttgaccgtatcatagcacgcgcgaatacccgctttatggtgatgtcgggaggacagtacgaactgaaacgtaggaaagaagctgaaaataaccgtagccaaagtggactcgatcttgacgttatcgatcattacaacggcacggaaagaagtgtcaagacgctttccggcggcgagtccttcaaagcatcactttctcttgcgttgggcctttctgatgagatccaagcatccgctggcggcgttaagcttgatacaatgtttgtagatgaaggctttggctcgctcgatgatgagtctattgatcaagccatgaaagccctcctgagtctagtggacggaaatcgtcttgttggtatcatatctcacgtagctgatttgaaaaaccgcatagacaaacaaatcgtagtcacaaaggaaaagagcggcggaagtaaagccaatattgttacctgaggagaaatagagatgaaagaatattcaagaggctctgagtggagaagatgggatctacacatccatacagcaagttcatatgatgcatataaaggcgatgattcggacaagttgttagcagacgctataaacaaaaatgagttggcggctatagcaataacagatcattttataattgataaggacagaattgcaaacatcaggggacttgtaccaagcacgacggtgtttcccggtgtggaattacgtaccgataaaggcgatacaaatatccatgtaattcttattttttcagatcaaatagatttgaaaactctttccgaagactttaatgtttttagaagagaggcgaaaaaccctaatgataacgacaagatttattgggattacaaagatatatgtacttttgctcaaaaacataatgctctgatttctattcacgcgggcagtaaagataagggcgtagatacccaaatttctaatgctctaccgattaatcaagctgtaaaagaagagtttgccgagtcagtctctatttttgaagtgggaaaagaaaaagatattgcaaactataaggaacatgtttttccagatataaaatctataaaacctctaatcatatgttctgattctcacgatccaaggaattacaatcctgctcaccagctgtggataaagtcagacccaacttttaatggattaaagcaaattatatatgaaccagaagagagagtatgtatatctaattatagacctcaagaaaaagctccatatcatataattgatagtattactattactgataatttgtttcagcaagatcaaattgtttttaatcaaaatctgacttgtataattggcggaaaatcaaccggaaaatccattttgttacataacctagcaagagcaattgatcctgaccaggtcagcgaaaatagcattataagcttgggccttcaaaagcccgataaggacaaaaagtcccttaccctcgaaatagattcatcaaaattaaatgtaaagtggaaaaatgggaaatcaggagaaaatcaaagcatcatttatattccgcaatcttatctgaataggttggcagactcaagtcaagaaaccacgagaatagatgagcttgttgaaagagtcttgcttaaacgtacagattcagaaggaaataagcttcagaatcataaggacaccctaatccagacgttaaacaagaaaaaaaccgaaaatacaaacacggttttggagattgttagattaaatgaaagtataaagcagttgcaaaatcagatttctgaactagggggaaaagattctgttgaaaaagagatatatcgattaaaaactgaccgagacgctattgcaaaggaacttaatattactgaagaagatattgaaaaatacgacgaggccgttactaccattaaaaccaagaaaattattgtagaagatatttcaagggaaataaataggctatcttcgttagtatcaattgtacaatcttcactagacttatcttcttttccagaagaaattaaggaacaacttgaagttatcattgagaatattatcgatgaagcaaataaagcgtggaatatgcaaaaagagcaattgcttgcatcattattagaaaagcaaaaagctgctaaggaagaatgtgatactgcttcggcaataagagattctctaaaagtaaagattgaaagcagcaatcatataaaagaacttgcacaaaaaatatctgatgaagaagcaatactgcaagcgattatatcaaaagaaaaagttttaaatgatgaaaaaaagaagcaagatatagcaattcttaacatatcttcttcgtgcattggcttgaaaaaggactatgaagagtatgcacgttatatatcggaaaacgcgaataccgatcattcggggctaacttatgaagtccaaataccagtaagagttgatgacttcctaaaaaatggcgagagctgtttagagaaaacaatccgcaaaataggaaactcattgatacagagactttttctgatagcaagtttacagatgaattattagtggagataataaaaaaggacttaagtggagaacttacaacactgaaagctggagataatgttgaaaacacattacgaagtattttgacggattggtataacattaaatatgtcgtaaaaatgggcaatgattcagttaatgttatgtctccgggtaaaaaagcattggttctgttacaactgctaattgatttggacgaaaccgattgcccaatccttattgatcaaccagaagatgatctagacaaccgatcgatttttgagcaattaataccattcataaaaaagaagaaagctgttcgacaaatcattgttgtgacgcataatgctaatattgttgttggggctgatgcggaagaagtgatcattgctaatcaaaatggagcggattcaccaaataaagattcaattcaatttttttatcgctctggttcaatagaaaacgatggtcccttactaaaagaaaccggagttgttgaagatggaattttagcaaaacaaggtatccagcaacatatttgtgatattcttgaaggcggcgagaaagcatttgagaaaaggaaaaataagtataatttaaactcatagtcagcgtcagcatgagttaatatctggggctcagggtccttttgacaagtgaatctgtacggacagattcgttgcttgttaagacaatgccgcatcatagacgacagccatttccgatcgatttcggggatggctgtttctgttgccttaccgtcaaatctgtaaatttgcttttcgcacattgggcttttcttctgggttgcgctatcatgtggatgatgatagaaacccgcacggcgggcgcaaaaggaggaagaatatgtacaacagattcgcagaaaagcgcaggcggtatctgcgtgagcacagggacggcatctacacggggatgctgctgaccggcaagctggacgagcatctcaaggaaatcggcgacacggcgcaggagatgtttgatcggttggttgcacagatgaaggaagccgagggcgtgactgagcagctgaaggccgagaatcaaatggaatgggtggggcggatgaacagcatccgcagccgtgcggaggaagttgtcctttctgagctggtttattgctgaggtgtggtgatgttcaagtatagaagaaatcgagtgttagcactctgcgccggcgagcgacggctgctgacaatggccctgttgtcctttcggaacaagctggtagcaagcggtaagcccaccgaggatatcaatgagctgctgatccggctgctgcggtaaaaactgaatacgagaaatgagcgtctgcttctgaaaagaggcaggcgcttatttttatggcatcaattttgcagccacaccgatgaaatccggaatggacatggcatcaattttgatgccatagacgaaaaaatggctccatttcggagccgcgagcagtcctgcataggaaaatggctccgatttggagacaaaacaaaaaattttccgagggggttaatttttcgcctttttcgctgcctaccaagtgaggggataaatattttttcgagtgacttaattttcagcctttctcgtgatctaccacttgaggagaaaagtcagcaagggacattgagaaagaatttttcggcaggaccctaaaaatgctcctctctcattcctcacattatgaggatatgtacctggaaaactaaatagccgttactgagacagatatgactgtgcgacgaccgcaaaagagcgagcacggcaacgccgcggaggccccggggcaggcatataaaaacgatatcggaagtacggtgcagcatcccctataagtaattaaataaataattactttctgtaccggctcaaaggaagaacttacttcctatagaagaagcggctgaagacagcgcgatatttccttttgagccagtatataggttggcctttcgcctgcctgaaaaataaaaaaatgaaggaggaaatcaaaatgaaagacagaatcacaagcacgatcacaaggcacatcggagtgatctccgaatcgtcacgaggctggaggctggagctgaatatggtcagttggaacggtgcagagccgaagctcgacattcacgactggtcccctgatcacagtaggtgcacaagtcgcggcaccttcacccatgaggaagcacgggtgctaatcaagctgctgaaaaaggaggtgtaaacatggagaacaaggtatacacccaaaacgagcttaaagcccagaacatcatcacgatggattatgcactgaaccttgaaccgggtgaattcgtcgccgttctcgatctgaaggcacaggcgagcaactgtctgcgcgtcttcttcacctttgaggacggccggaagatcatggcggcagcccagtggtggcagaggtacttagggttctatgaaatcccggtcggtacccgtttgctgctccactacagagaaaattcaagaaaggaagtgtatctcgatgaagtggaacgaatataacgcggctgtctcagcaagcaacgaatctgcccgggcagattcacatcacagggctggccctgaaccccccgagacagaaaacaagaaaccgaacagaacaaggaacaacaagattaccgtttatttaagtgatgccgagctttcacggctgaatgcgatggtggacaagaccattatgaacagagagcagtttatccgcaaaatgattgaaggaaagacgattacggaagcgccgccggcaccgcttctccaaacggtacggatgatgaaggatgcgcagttcaatatccggagaatctccgaatgtgcattgctttcgagacccattgatgaagagctgctgcgcaaaacacttgaggatataaatacctgtgtgcaggaagttatggcaagatgcctgccgctggaagaaaggagatccgatacgcatgaaatcagaccgcatagacctgggcctgaccgggtacgatgagctctttatgagcacagaggagcggctcgacgcgaaaaagccaaaggtggacgagtttcctctcgacaagctgaagccgtttaaaaatcacccgttcaaggttatggaggatgaagaaatggaacggctgaaagaaagcatccgggtatcgggtgtgctgctcccagcgctggcaagacccacagaggacggctacgagctgatctccggacaccgccgactggccgcctgccgcacgctcggtatgagcaccatgccggtgattataagaacgctcacggacgaggaagccatcgtcacgatggtggacagcaatctgcaaagagagcacattctccccagcgaaaaggcgtttgcgtacaagatgaaaatggaggcactcagacaccaaggaaaaacttctcgccaagttggcgagaagtggagtgtttctcaaatcagtgaaaccggaaccgatagcgaacggcagattcaccgttacatccgtctcgccaacctcattcccgaaattctgaaactggtggatgagggacggatcgcgctgactcccgcggtggagctttcctatctcaacaatcacgagcaggaagttctgagcaaaatcatgtcctgcgatgagcttacaccgtccctttcgcaggcacagcgtctccgccggctcagcgaggattatacgctgaccgatagtggcatctcgcaaatcatgtccgaaatcaaaggcaaccaaaaggaatatctgaaaatcgaggccgagccgctcaggcggtatttcccgcccggtacgaccgccaaacagatgcagacaaccatgctccgcgccatggaattttaccgcaggcacactcaaaaccgcgcagacaaaccgaaagaaagagaggagcgataaccatgaaaaagaaacccgaacagaagcagcccggcagccgctttatcatcgggctcggcggcggacaccgtgaatacgacattatcaacgcccgctatattgtggaggggcggtttgccgaggcaacgctgacgaacaaggacaagaccctttccgatgccatggaggacattataagcgacgaatttacagatttgaccgcgccgaaggaagaacctaaaatgaaagcgaaacccgtgcgttcgactgccggaaaggagagttaatttatcatgtagtcgaataaaaagcaaaagcaagtaaccggcattaccgccttgtattgccgcctcagccgagacgacaatacggatagggaaagtaactccatcgccaaccaagagttactatgtagagggtggtttctcccacctaatacatatgactgtggctcatttgtggtgaatggaacagcagttgtaggaaaggagtagaataatccttataaccgctgcaaatcaacacaaaaaggagctaattcttatgaaatctctatttgaggaaatgggcggcacttaccgtcaggagggtgattatcttatcccgaaccttgcgctgccggacgaaccagaataccagatcggcaagtacgggcgtatgcgccgtagctatctgaaagaacatcgtccggttctctatgcaagcctgctcacaagcggaacgctgcatcggcaccttgccgagatcgaccaagcctgtaacgagcgcatggcaatcatcgtttccgatatggcaaggcaggaagatgtgaccgaagcgctcaaagccgccgaccaaatggaatgggtgcgccgcatgaacaacatccgcagccgcgcgaggaaattgttttgaccgagcttgtatatgaatgacaaatgcccgttattggctgcatggccgataacgggcattatctttattcttttggtgctataaacttgtatttgccctttccaaagccgctgacaggctcaatcaaatccgcatttttcagttttgtaatgagattccctgcggcagtaacagaatcctttgtgatagcagcgatgtcagatcggccaaagacgccatcagcgcccatatttgcaaataccgctttcgcctttgcaatcgtcccttggcttgcgttcagccgatcaatcgcaacctcaatcgcaacactttcgtcctcaatcgtaaccttgcttgcggttgccgcagttccgtaattcagattatagagcgtaacttgaaaagaactggcatccgaatagaattttggctccagctcatcgtggtaattgtgagcggcacggtaggtttccgtgattttcttaaagccgctgccttgccgctccatataacccagccgtccgaaaatatctgcaaggacggggttgcggcgcgtggaggaaatgctggacagatcccgttcctgtatccgtgtgccgtcaggcataccgccgggagaatagatggtgagacggtcatcgtagatatcaatatggacctcgctgcccaaaatcagataatcccgatggatcagcgcattgacaagagcctcaaaaacgctccgctcgcagtagtcgggcatctcaacacgagaatcggcggttttcttccagcgtgttttcatattccgcttaacaaagccgacgccctcattgagcagaatgatcaggctgccggagtattccgcgctgtcaagtgcatccaccatgccgccgcttttatcaaggccgttccagcgtgtgcagaacagacgggaatgccggatgggagaatcatctgcaagcaaagcgcctgcattggtcagcttgtcgtgttcgtcccgcatatcgaaggaatcgaacagcttttcttccatgctgttgcctgtccacgccttataccgctcccgcagcttggaaaaagcgtaatccttgaaatcatattcagaaaccagttcgtcataggtgcggtgcattcccttgagaataagctggttcagcacataggacggggcgatcacgctttcattgccgatgcggatatatgcctccataatgccgtctgctttgtagtaatacggtgtggagcgccctgcggacacagacagcacaagaatatccttgccgtcctcccgttctggcgtgaggataaaactcggataaggcgtgatacgctctttgatcaaccggctgattgcctctgcatcggtctgtgcatcgtctaagccgacagcatttctgtcattatcaataccaaaaaacagcgtgccgccaattccgtttgcaaaagcactgacgcttttgagccagcttttcggcttctttacctccagcgcgaccttgaaatcacattcggtcgcttctgcgatccagcgctcaatcatcattctcaccgtcctgtcccttattctttcctctgctcttatagacattatactgattcttgcaccgggcgctgcaaaatgcggaattggcccggctgccgaggaataccttctggcagtgcttgcacagccgcaggggctttgcatcgtccaccagcatgaaactgaacatcatctggatgcccagcagcagcgaatgaaagtcccaatagatggtcggcttctccagcagttcaatatgataggtaggcgcaatgccgccgaaggcagccatggccttgcggtagagatttcttgtgtcctcatcaatgctgtcgtagtcgttatagtacaaaacggaggtggtcagcgtgaacgcccaatccttgaactgctgtgctacccagtcataaggttcggcatactcccgctggaagctcatgttcttcgccatcggctcatccatgaaggtcatcgtcagggcgatcatcatattatccccggaaacattccaactggattccacaccctttttcaccacatccaatttatcgaagggatagaacagagcaagataatcctctgtcgccatgctttcttccttgatgaagtgattcttcggcagatagactgcctcatagtccataaaggacggcgtggtgggcagtgccgtcatcagccccaacagaccgtagtgggtcacaaaggccagaattgccttttccaccacatcctccgacctgcagttcatcatcagcatccccacattcagtgcttccagcaccatctcggaggactccttcagcgggttatagatgtcgggctttgccgccttctccggcgtaatatagcgttttccgtccttgccggtcttgatctcatagcggtcataccgcacccaatgggaacgggactgcgcaaacagattgttcatgacgctgttcctctcgaatcgtaatctatctatatattaaccatattaccattgtatcaaccgtccttggcatcgtcaaggacggctttcttttttctcggctttgttttgttctctcggcggatcacggcatccttgcccatggtttgcagcagcgcttcatattcctctacgaactcgcgctcccgcagggtaaggccatgatcgttttccagcttttcactcagatgctcatacatccgcttttgcagctttttctgaatggtcatccgcagctttcggatgtttcggtcggactgtccacggatggcagcaagccgtgcggtgctgtattgcttaacgaataggtagtacagcacttccttctgctcatcactgagagtgaagaagagcttggagagaaaccggtttgctgtcagctcgtgcagctcatagggacaggagaagatgatgtcgagaaaacttccctgacagagctgacggaacctcggcagattcatccacagcggggcaatcttcggatcaggtaccgcctgaaactccaacggcacatccccacgcaggttttcgtggtcacgttcccggcgctcccgatttctgtccagcttgttccactcgtctaccacagtcagaaaatcggattccgcccgggctgcttcctccagcctccgtagagcctctgcccgaatttcccgcttgagccgtttctcgctggtgggcgcggcttcctcttcctcgtcctccagctcggcgttgtagtctctggggtgctcgtcttgctccagctcgctctccagctccaacgtgcgttcctctgcaagcgcttcctccagtgtctcgtcctccggcgcaccgtcagaggaatcctcccaatcggcaaagccgtccgcagccgtttcaagtccggtttcctctatttgctcctcggcatcttcttcctcatcggaaaaatcatcatcccacagcagttcatcctcccatggttccacgacagcttcacctccccgaaaaagaatttttctttttttcaaaaacagttccgatttacaccccgtatttctcctattagtagagaaagtaatcttatcgcaagttatacaggttactttccgagccgtcagcaaaaaaggaggatatggagcatggaaaaccaacagaaagccagggttagcttacagccaacggaaccaaacacattatatcaaaaaccaaacaatcacgcaaggaggatgcctatggagcagaacaaacgagaacagtttatcatccgccggatcggcggcaccacctacaaggtcaaagtcgtattcaatgaaagcggctacgagaccatggaggataaaattttgcgcattgtacgcaatgatatggttacaaacgacggaacctgtggtataatgaaggcaccacaaatgagccgacagtctgaaaggagcgtatcatgagcgcgaaacagactgaaagcaaaattaccgctctctatgagcggctgtcccgcgacgatgacaacgccggggatagcaattccatcgtgaatcagaaaaaatacctcgaaagctatgcccagcagagaggctacaccaactgccgccactataccgatgacggctggagcggcggcaactttgagcgtccagcatggaagcaactcatcgcagacattgagacgggcaaggttgcccgtgtgatcgtcaaggatatgagccgggcggggcgtgactatctgcaaaccggcttttacacggaggtattcttccggcagcacggcgtccactttgttgccatcgccaacagcgtggacagtgatgaccagaacagcaatgaatttgcccccttcctcaacattatgaatgaatggtatctgcgcgacctgagccgcaagcagaaaaccgccatccgtgtcaagggagaatccggcaagcccaccaccaactgtgccatttacggttacaagaaagacccggagaacaaataccattggctgatcgacgaggaagctgccgccgtggtgcggcgcattttccgattgaccatcgagggcaaaggaccctacgatattgcccgtattctctttgaggataaggtggagacgcccgccgtgtacttcggcaagcagggcaagggcatctggaaaagcaaagaggaattttccaatccctataactggagcggctatgtcgtggggcagattctcaccaagccggagtatatggggcatacggtgaatttccgctcccacaagcagtcctataaagataaaaacgccgtgatgaatcccagggaggactggctgatctttgaggatacccacgaggccattgtggacagggaaacatgggagcttgcacaaaagctccgcaagacacccaagcgcatcgacacgctgggtgaagcgaatccgctgaccggccttttgtactgcgctgactgcggcgagaagatgtataatcaccgctccaaaggcggcacggagaataatccctatccatccgacttcttcgattgttcctcctatatcctcgctcgacagaaacgcacaaccgcctgctgcggccattatatcacgaccaaggctctgcgcaccctgattctggacaccgtccgcacggtcagcacctttgcgatttccaatcaggcggcgttcatggaaaaggtgcgctccgcctcccagctccggcagacggaggcggccaaggacgccagacgaaagctgagtaaggacaaaaagcgcattgccgagctggacaccatcatcaaaaagctctatgaatcctttgccgtcgggcgcatcaccgatgaacgctttgacagcctgctggtggactatgaagcggagcagaaaacgctgcaagcctctgtcgcagaagcagaagaaaagctgtccgctttcgcagaggataccacccgtgtggagctgtttctggagctggcaaggaagtacaccgacttctctgagttgaccacgcccatgatcaacgagtttattgagaaaatcatcgtccacgccccggaaaaaattgacggtgaccgggtgcaggaggtgcagatccaccttcgctttatcgggcagttcgagcttcctgcgccggagctgactgaggaagaaatcaagcggcaggagttcttgaagaaggaacgtatccgcagccgggagcggtatcagaagctgaaatccggcgagcgtaccgtaggtgttccggtcacgctgacctgcaagtgctgcgggcaggaatttacatccaagcggacgaacaccctgttctgcggccccaactgccgggcaaaattttaccggcaggaggcggcggagagccgcagccgggagtgtacctgcgagaattgcggtaaggcgttcaccgcaacaaggtcagatgtgaaatattgcagtgactattgtcggtatgcagcgcagatcaagcggcagagcgcacaaaagaaagccttgcgagaggcgaagaacgagaaagaaacgaaaacagcataagaagagacgcagacggcggcttgcccctaaacgggcaggccgccgttttttgcgcagaaatggaggtacaatgaatctttttgaaattgtaaaatacggcgtggaggtcaaccattacggcatggcgctctgtccgtttcacaatgaccggcaccccagtttgtatgtggcagatgatcactattattgctttgcctgcggggaacacggggatgtgatcgactttgtgggcaagctgtttcagctttcgccctatgatgcggcgcggaagctgatggcagattttcatctcagcccggacaagccgcccagcgcagcagcactccacgcaaagcagaagcacagcagctcatggaaaatgagcggctgtgcttttctgttctgtcagattacgcccgtgtgctgcgggattggaaggtgcggtatgcgctgaaatctcctgacgagcctgttcatgcacggtttgcggaagcctgtcacaacctcgaccagacggaatactacttggatattctgtgcgcaggtgattcccatgaacgtgccgaagtgattcatcagcagatggtggacggaaagctggacaggctgcgacggaggttagagaaaattcacaaggaggaattggaagatggatatgacaccgcagacgtggcctgactggtacgacggcagacacatcaatgaagtgatgttctgccagcagtttttggagaagcaccccatgaaatgtgtgcgcgggcggctgttcacggttgacggtctcatcgaggacgaagggcagatcggtaatctcattctggaggaaatctccggagttctgacctccgggctgtccaaagttgtgacaaatctgcttgccagcatcaagctgcaagcgtattcgccgccgctgcccattgaaaccgaccgcatccatgttgccaacggaacgtacttcatggacggcagctttaccgccgacaagagctactgcaacaaccggctgacggtcgcctacaaccctgacgcacccacgccaaaacgctggctgcaattcctgtcagagctgctgcaaccggaggacattcccaccttgcaggagtttttgggttactgcctgctgccgaccactaaggggcagaaaatgctcatgttgatcggcaagggcggcgagggcaaaagccgcattggtcttgtcatgcgctcgctgctgggggacagcatgaataccaccagcatccagaaggtggagagcaaccggttcagccgcgcggatttggaaaacaagctcctgatggtggacgatgatatggatagccataaatcaatttctcctttcagattttcagtttttagttccaattcattaagccgtagcccttgatacagccatagtcaacgggatagctctttatcttgcaagcgtcgccggaattgccctcgacggtatagacgcgctccccgtcagtcccgataacaagccctacatggtctgcgctcccgtccccgtcccagtcgaaaaagatagcgtcgccgggggcgatattcgcatagcccctcgcaccccattgcccgcgtgactggaaccacggtacgccctgtgactggcacccggcaaagcgcggctccgatagccccgcctgtccgtagcaccacgaaacgaaacaggcgcaccattccacgcggctgttgaagccgtaccagctccaataaggccgcccgcccacgtttccggcctgccgcttcgcaagctctacaatggcggtgttgccggggcgtgtgccgttcacaagctgtacgccgcttaaatcctcggacgcgcccgtatcgggagaaccgccgccgaaaatcagcggcttgttgccgcttgtttccagatagacgcggtacatttcaagctgctccggcgtaagaagttcctccgcaatctcggaaacaggcttgtttgtcagcttcacgttgagaatgtaatagttataggcaacgtcaacctcgtattcgtaggtttccgtagaggtttctcccgtttccgggtcggtgacggtgcgtgtgcctgtgcgggtttccgtcctgtggcgcacttcgatttcttccgtcagcgtcaaagtgtactgcatatcaaagacgcggtttatttctgcctgtgcgctctgcggggtgtaggtctggaaaagcgcggtgaggtaggacgctaattcatgggggttatgcccgatactgtcaaggtcatagcggtattcgtcatagcccggattgtcgcgctcgatattgtcaatccgctgctgaagctcgttttcctttgcggcgtaattgttctccgtcgccacaaggtcgctgtcctccgacgtgtaggaagtccagacaatgccgttcatcaagccggagaacatagagccgcaagaggaaagccccgccgaaatcataatgaataagagcagcgcggcaacggcgatacaaacgcccgccgggtgccttgccacaaacgccgccgctttctttgtttcctcggctgttttcttcgctgccttgcgggtgttctctgcggctttctgtgccgtttttgcgccgtttttccttgccgcctttgcatactgccgcttgatttgctgcttctgcatgaagcgggaaagggggttgcccccaatctgcggattgtcatgtagggctttgtggtactggaaatccacattcgccttgaacgccgctttctctgcctttgctgccgcccggtagggtttgagcttgtggctgcggtagccctccttgactttccgcgccccgtactttgcgccgcgttctgccagttcttcggatttgtgcgccccctcaacgccggaattgtccttttcaacggaatgtattttgttgtggacgaaaatacccgcttcctgtgcggggcgggatagcgggttattgtggggcttgttctttcctatgggcttttcccgttcctcaaagcgtaggcgggtcttgcctttcccggtggcttcgtcaaaggtgcgctcccccacaagtttcttttctttggggatagctgcctttgccgcgtccagacggtcggctgctttgtccgattttcggatatacttttcaagctccggcgttgcccgttcttcctcggtaaactgcaagcgggaagtacgggtgcgggcttcggcttctgcctgtgctttcctcgccgcctttttgctcgtctttctggtatgcgccccgtcgatatgctccatgacgcgctcggctgcggcggtgtcctgttcccgttctgcccccggcgcatggggaagcgtcggcgcgtcggctgtgggcgcgggagctgtgccgcccggtaggggctgcgctgcctgttccggctgctgcggggcggcttcctttctggtaaggtcagcgtcccttatgcggttgctgatacgcttcttcttgcctgtggcggcgtttacctcaacggctccctcgcgggtcattttctgcgtgactttctcacgcgctttatactgttttatttttctgtccctccaatccgcgcccttgcaagggcgcaatattcggcgtttatctcaatgcctatataatgcctgtgaagctgctttgcggctgcccccgtcgtgccgctgccgaaaaaggggtcaagcacaacgccgcctttcggacagcccgccttgatacaggtttcggctaacttcggcgggaacgcggcgaaatgcccgcccttgtagggaacggtattgataagccacacgtcccgcctgttccgcatggtcggcatgagggcttcgtcgtagtagctgccgctccttgcccggttaagcccctgtactttcccctgtccgggtacttcgtccgcatatttctgtcccgcgctgcgcccggtgcggtaccgcgccgccgttgtaggggctaacggctcggctatggcggctgcgtcatagaaatacttctttgacttcgtaagcagaaagatatgttcatagcagcgggtagggcggtctttcacgctctccggcatggggttctctttctgccagataatatcgctccttaaataccacccgtcagcgcgtagggcaaaagccaagagccacggaataccgattaagtccttttgcttgcagcccgccgcctgtcttgcgattgatacggcttgaccgttcctccctctggggttcttcgggtctgcatggtagcctttattccctgtgccgcagtaggtgtccgcgatattcagccagaaagtaccgtcggtacgcagtacccggcgcacttcgcggaaaacttcggtaagcctgtcaatgtactgctccggcgtgtcctcccgcccaatctgtgcgtcaagcccgtaatccctaagtgcgtagtagggcgggcttgtgacgcaacagtgtacgctttcctctggaagctcccgcaaggcatagagcgcgtcccggttgataatggtgtctatgttcagctctgtcatgcttcgcccacttcctccggcttcgtcgtcattacccggtaaagctcggtatctttcgggaagcggtctacaaagggcagcaccacgttcccgtagaagataagcccctcgcccgcttcggtgtgggtgacatacttcatctgctgcggggaaatgtttaactgcttcgcaaggatagcccggtcgcccgccgcctgattgagcatgaggacaaaatcagagttttcaaagatattctccacttcgcgggaagcaagcaaatctttgacgttctgcgtaatggctgtgggtatgccgccccatttacggaaacgcttccaaatctccacgctgtacgcggcggtctgttcctctttcaagagaagatgaaattcgtccatgtagtagcgggtggatttcctctctgcccggttgatagtgacgcggttccatacctggtcttgcacaatgagcatacctaactttttgagctgcttcccaagctgcttgatgtcaaagcagacaaggcggtttgaaagctctacattcgtcctgtggttaaagacgttaaggctcccggaaacatacagctccaacgccgacgcgatacgcgccgcttccggttccggctgcttcaaaagctcgtcgtagaggtcgcccaagataggcattttctccgggtcggggtctgcaaggaaaggacggtacacgttcctaacagcgcggtcaatgacggtcttatcgacgggctgcaagccctccttgccgcctatgacaagctcgcagagggagaggataaagtcggatttcagcgcaagcgggctgtcgtcctcggaatagttgaggttaatatccatagggttcacatactggggcttcccgtcaatgcccttgcccgtaggcgacaagcgtatcacttgcccgtcaagccgctgcacaagggaaaaatactctgcttccgggtcgcagatgataatgtcgtcgtccgtaatgaggaaagcgtttgccatttcccgtttggctgcaaaggatttcccgcttcccggcgtccccaagattaagccgttggggttttttagctgcttgcggtcgcagagtatcatgttgttagacagggcatttaagccgtagtacaacgccgcgcctgtctgaaaaagctcctgtgtgataaaggggataaagatagctgtgcttgacgtggtaagcccccgctgtatggggataaggttctccccaagcggtacagaggacataagccccgcttcctgttggtagtcaaggcgggtgagggcgcagttgttcttctgtgcaatgcccgccgccgcgaacacgtcattttccagtttccgcttcgtatctgccatgttcaccacaaggaacgtcaaaaggaacattctttcattccggctctgcaagtcctgtaagaggttcttcgcttcgctgccgaatgtggcaaggtcggacggtataatatccatgtcatagccgctgcgtaccgctttcttctgttcctcaattttcattttgtcaaggtcggtaatcttgcgcttgattgtctttatggcttcggtctggtcgatactgtggatatgcagattgacgataacgcccgtttccaagtccagtatgtcggataagatacggtcgtttaattccggggcaaggatttcaaggaatgaaaccgcgccgattttgcgccccatgcggaagtaacgcccctcgccaaaacggaaagaggacggggcgataaagtcctttgtggaaagcccagacggggcaagccatgaaaaatcaaaggcaaactgcccgccctccgggtggaaaatcccatgcagcattttaaggcgttcatagcctgtcatggggtgggcagacacgcccaagagcttgaagttgttcagtacgtccgtttcgatacgggcaaggcgggatttcgccgcgcccagactgtcggcttcaatggcaaaggtgatatattttgctttgacaagcccgttgttgccttttgcaagctggtttttgagcatatcccggtattcgctgcggatagagttgaaagcgtcgtcctgtgccgggatatggatagatttctccgcttcgccccgctgcgtcccctgattgatgaaagagagctgcaccgaaacggaagcgtcaaagtagttgaggaagtcgcaccagttttcaaaaatggcggtcttgtcgtctgcctgtgcaagctgatagttaatatcttcaaaggctatggtctttgagtatttccgttccgtaaccttgcagataccgtccgggtacatctggatataggggattgtctgctgcgcggtgtgcgctttcccgtcgccctttgcctgtctgatgatttccgcaatctgtttcttttcggcgcgggtgagcttgtggggcgggttagcctttgcaggcgcgtttcccgccacgctgtttcttcgtgtttccttttgcaatcgctgatacctccttttcaagttttcgctgccgttcaaggtcagcatatagattttcagtcctgtatggtcgttcctttggggctatgaatttcgtccgtatgatgttcctcaccaccacttcaaggggctgtccatgcttctcatacatggcaaagaggaaacagggcagcatgaccgcaatcatagccatagacgcaaggcttgtgcctgtgctgtctttgagcagaaagaaaagcggcaaacctataatgagagccgccgcaaaacatacaatctgccgtttggtaaggttgaacgctacttttgtcttgactttggataagtctttgggtacgggtacatacgccaagtgaaaacctcctttcgttatgttttgtgttgctgtaacttcccataggggcaatcaaggcaaaggtcaatttctgccctttgcccgtccctattctatggggtttttcccgcgtcaaggtcgggtagtattttcgccgctttgctctgaaaatctccaccctacccttgacacgccgctaatgcgcggagaaaatcgacttcgccagtgcgccggatttgaacagggagaaacagaggataacggtataggctgcaagggagaatatcgcgctgtgcaggttgtccgctattatcatgttgttcaccaatacggcgtaaatgccgacgcatatcattatgaggaagccttgaaagccaagggcgaacagggattttaggtagttgtttcctatctgtccccattcccggttagtgaatgttgcaaacgggataggcgataccgaacagtaaaggtaaatctctatcatgcgcccgtagaggataacggttatcagtacggacattatcttcatgcacaagctcacaaggcttgtttccatgacaagtaagagcagttcggggatttccatagcgtcaagcccgctctgcatggaagcaagggcggcggcaacatcaatatttgtgctgccgccgattacccccgccgcgccggaaacaacgtgctgcgccatatcgaacaccgccatagtgatgtcaaaggtatgcgtcacaaggtagactgcgacgtaagccttgaatacccacttgaagaacatggaagtgtcaacgtcgtgcatattgttcttttccgttaccatgctgataagctcatagcataggacgtaggtaatgacaagccccgcaatgggtacgattacattctccgatagtgtgcgtatcatggagaagatacccgcgttccacccttgcggggtctgccctacctctgcggcgatagtgccgactttctcgttcacgtccccgaacatagttgacagattaccgtttatggctcctatgaggatttcctttatccattcgttaatcgcgtcaagtatgctctgcataagcctttacccgcgcttcttaaccgaacaggccggaaagcagcggtacaagggtcatgccgataagggcaacgccgccgcccgccatgagctgcttcatgccctggctttttactgatgtgtgataaagaagtaatagaagtgtaaaaaattttgccgttcctatccggcacttgcgcattgtgtcggataggtcgggcggttattcgggcaagcccaccttgccaacaaaagaataataaat

SEQ ID NO: 16 - DNA, 380944 bp, Intestinicoccus colisanans
  source 1..380944: mol_type = genomic DNA
ccgatgactgcatcctgtttctctttcgagcgatcttgaagtttctcctgctaaattcctctttacaatagctaacttttcttctttgcttcgcatcgtgtatttaccagccatattgccacctccatgtctataatagcataaaaataatggtaggctcttttgtgtctaccattattttatcacttcagttttaaagctgcggggtgtttttcattgaaaaagctccgggaaacacgccttttgttccgccgaaaaatccgtctcgaccgttttatcgatgtcgagcgccgggcataaaatatgcactgcacggcagcagagcatctggtgctccgttctgtccaaatgcccgccgtaaaggtcgtcccccgccacgggatgcccaaggtgcgccatgtgcacgcgaatctggtgcgtgcgcccggttttcaaatggaagtcaacgaggctgtacccgccgctcgttttcactgtttgaaattccgtcacggcctcaatgccgatgcccgcgcagcgctccaccttatgccccggctttaacccgatgggcacattcacacacccgctttctggcgcttcgccctcgcacacggcgcggtacgttttcgtcagctttgcgtttgcggcaaatttgtttttcgccagcaccagcgcaccggtcgtatcccggtctaagcggtacagcggccgaaacacaaagtccggtgtattttgaaaataccacgccgccgcatttaaaacgctgtcgcggtcgtgccccggcgaggggtgcacaggcatattgtacggcttatcaagcactaaaaaatcctcgtcctcatataaaaccgcaaacggcaggtcggctttttcatacgcttcgcccgtttcaagcagcgtcaaagtcagcgtatcgccggctttcaaaactgcgttgctgtgcacgggttcgccgtttttcagcatctctccctcgtatttcagcgccgttaaaatgcgtgcggaaaaccctaagtaccgccgcacgaacgtgcgcacgtccatgttttcctgcccacggtcgatgacaaattccagtgtgcgtttcattacttgctgcgcgtcgcgagcttttccgcaaactcgtgcaggaacgtgctgtccgcgtcaaacgcgtcaagcgcatgaagcgccttttcggtatgctcatcaacgagcgcctgcgctttttccacgcccaaaatggaaacatacgtgcagcgcgcgttttgtgcatccacgccgatgttcttgccaagctccttggcgtcaccggtcacatccagaatatcgtcgcggatctggaacgccaaaccgatgtgcagcgcatattcctttgctgcattgatctgcgtttcgttcgcacccgccgcaatgcaacccatcatgcatgccgccatgatgaggttcgcggtcttgccggtgtctttttcgcacagctcatcgagcgaaacagtgcggttttcggttgcaaggtcaatgcactggccgcccaccataccgtgctcacccgcgcagcgcgcaagcaccgccgccgcatacgcagcgcgctccatgccgacatttcgaaatgcttcactgctcagcgccgtttcaaatgcttttgtcaaaaggccgtcgcccgcaagcaatgcgtaattttcaccgtagaccttgtggttagagggcttaccgcggcgcatatcgtcgttatccatgcacggcaggtcatcgtggatgagcgaatacgcgtgtaccatctccacggcacacgcaaacggcatcgccatgtcttcatcgccgccacacagctcgcagaacgcaagcgttaaaacggcgcgcacacgcttgccgccgtttaaaagcgaatagcgcatggcgtcggtcacgatctcggaaagcgagcccctgcgctccggcaaaaaatgatctaaggctttttcaatgcgttttaccctgtcttccatttttattcctccgttttcgcagcactcagctccgtaattttctgttcggccgtgtttaatttctcatagcaaaagcgggaaagctccgcgccctcgctaaaaagcttcacagattcctccagtgtcacatctcccttttcgagcgtctcggtcacctcgcgaaggcgcagcatcgcgtcttcaaaggtcatggtttttttaggcatcggtcatttccctcttttctgttttctgcacccgcacggtgatcgcgccgtcctctacgcgcgctgtcaaaacgtcgcccggctttgcgtcttccgtgcgctttatcactttcccgttttcgtcggacacgatcgcgtatccgcgtgaaagcaccttcagcgggctcattgcgtctaaccgtgcggaaagcgcagcaagctcgcttttcttattcaaaattctgcgctcggcgctgtgcgtcaggctctgcaccgtgtttcggagcgcctgcctacgcggtgaaagccacgcggacgggttttgcaacacgtttgcgcttgcaagcgcatcgagcatctgccgccgatcgtcaagccccgcctgcacactgccgcacaaacggcgcgtcagctgcgcaagtgccgcacgcatttcttccctgtccggcacggcaagctctgccgccgcgctcggcgttggcgctctcaagtccgcgacaaaatcgcaaatcgtaaaatccgtctcgtgccccacagcggagatgacgggtatcttcgacgcgaacactgcccttgcgagcgtctcgtcgttgaaagcggccaaatcctctgcggagccgccgccgcgcccgatgatgatgacatccgccgccttttgggcgttcatcaatttcaccgctgccgtaagctgcgccgctgcgtcctcgccctgcacaagcaccgggcaaaacatgatctctgccgcaggccagcgccgcgaaagtatgttgcgaatatcctgcaccgccgcacccgtcggtgacgtgataacgccgatgcgcgccggaaacggcgggatcggccgcttgtgttcttccgcgaacagtccctcggcagcaagcttttctttcagctgctcaaatgctaagctcagcgcgcccacgccgtccggctgcatttcctccacatagaattggtactgcccgccgggctcatacacggccacacgcccgcgcacgataacgcgcatgccctctttcgggcaaaaacgcagccgccgcgcggcagacgaaaacataaccgccttcaaaacggacttttcgtctttcagcgaaaaatacaggtgtccggagcggtagtgatcggtaaaattggaaatttcaccgcgcgcgtaaatgtcgcgcatgcggccgtcaccctcaataagcgactttataaaaaagttgatctgcgaaaccgataaaacgcgcatatcaggcctcctgcgaaagtgacgccaaaacggcgatgccggcagcgttatccgccgaaaagcgcggctccgcaaacagtgcgccgtactttcggctcatgtgcgcgcgcagcatggaatttgaagacacgccgcccgaaaacaccacaggcaaatcgccgaatgtctcgataagcgccttacacatcgcgtccgatgccgcaatgacgtacgccatgcacgtcgcggcgatttcctccttcggtgcgccctttttcatcagctcgcggcatttattttccacaccggaaagcgagcagttcgcgcctttcatcgaagcgcgcacgcgcagtctttccgtataattgcacgcaatggggtctaaatgtttgccagccggaaacggcagaccgagcatcacgccgatgcggtcaatgacctgcccagcctttaaatcgagtgaagacgcaacaaggcgcgtgcgaaacattttgtcaccctccacaggttctaccaaaaccgcttccgttgtgccgccggacatgtggaacgccaaaaagcgctcgtgcagcaagtccagtttatcaacagagtaaagcgccgccgcaatgtgcccctgttggtgcgaaaagcgccgcagcggcacccctaacgcctgcgcaagcatctgcgccgcgccgatgccgaccaagaagcacggcatataggagtccttcgcatcacgcggacgctccgaaacgccaatgaccttcgccccgccgatcttatcaccgagcatggacagcacctccggcagctggcgcgtgtggtggaacaccgcgtcactctggcgcagtccgatctcgccctctttcacaggcaaaatcatgccgcggctgtccatttcgccgtcgccgaaaaacgcggcgctcgttgtgtaattgctggtgtctaaaccgagcgcgctgatgttaggcattttcgctctccgtctcgttcttcgctccctcaagcttctttgcaattgtggaaagcacgccgtttacgtaagaagcgtccttttcgttgccgtaaatttttgcaagctccaccgcctcgttgatggaaacgctcaccgggacatcgtcggcccgcataaactgcatttcgcacacggcaacgcgcaaaatcgtcagcgtcattttagaaagacggcgcaaactccagccgcgcagattttcttcgatcgtgtggtcgatctcgtctaaatagagctccgtcaaagcggtcagcttttcgcagtacggatcgacaacaacgtcgcgcgcttcctccgccatttcaatgatgtcttccatgctgtcgcccgtcacggtcttttcaaaaagcagcgtaaaagcctgttctctcgattctcttcttttcgtcatactcggttcctttcccttatctcaataaaattcattgtgtgattcatggcggatataaacaaaaaagcccgccgaaggatcggcaggcaatttgagcagaaatcaggcactttcgggtttcaccggtgccgtttgatgtgcagttttcaagctccagacatacacgccgatatgttctggaatagtataccacgataaacggtaaaatgcaagaaatcatcttttatttcgccgcagaaatgatcttcacgttttccgcgctgacgccgctttcggaaactgcaatgtcccgcacgatgagtgcgttctgttcgtcctccatgtcgccgtttacaaccaccgtgcagctctcgccgttgatgtacgccacgcattccgtaaagcccttcgcttctatgagggactctatgtttgtctctttcaaaatgttctgcgcgataaccgcagcttcgtccacggcggcctgctttacggcgacctcggcgctgtcgtctttcagaatgtcctccagcagttccacggcctcatcccgtgcggtctggcgcgtcaagcgggcgtccgaaagctttgcggaagccgataccgcagccgctgtttcttctgccgcgctgctttccgccgcaccgtctgcgggctccgtttccggcagaacgccgtcctcgttcataggcgtgtcggagactgtctccacataggcgttgttcacaagctgcgccgcaccgagggcggaagacgcactttcctcgctgacatcgcccgcgctctgcacctttgtgcccgcaaactgccagtttaagtacaccgccgcaccaagagccagcacaagcgatgccaagatcagctgtcttttaccgtatttcattccgtgttcctccgatcttcactgaatggtttcattcgttgccatatgtatattcgctgtaccccaccacgcatacctgcgtagaggataaatcgagcgcagtcttcacggcctccacaatcttctcccgcattttcgggtcgcctcccccgcgactcacgactaccacgccgcggatctccggctccgttttcgtcacgatgagcggcttctgcgagccgtccgccgccttcaccaggatatacgtcttctgcgtgtcgccgtccgtctgcgtgcggttgaggctttcgccgctgtactcctcggcgcttttttcgctctgcttatcttcggtcgcatacaccgtttcgcccattgtacgcagcgtcaccgtcacctgcggctcgctttcccccgtgatagccgagaccatctgcgcgatctgcgcggaaagcgctctggtgtagtctcccgccgtcagttccaccgtctccggcgcttcattttccgtgttctttgtgtccataggccaaaggagcatcaataaaacgagcgccgcgcaggctgcaatgagcatatacgtcagcttaccgtttttcaaaaggcttttcagtttatccgtctcgcctcacctcctacacgtacacatccaccgggatggcctcggtcagcacgctgcgcaaaagcgcgtccgcacggtcgatgtctgtcgcaaaccgcacccgtacccgcacacgttccaccgtcaccacgccgtcatcgtcctgcgtgtaccaaatgtcgatattcgctgccggcacgttcatccccgcacttttcaaaagcgccgagagccgctctttcaaaatcgccgtgcccttttccgcgtagctttgcgttatcgtcgattcggcttcgcccgtttcggtcaagtcaaaatcgagcgaggccccgctttgcagctttaaaatgccgtttacaagcaccacaagcagcatcagcgctgcaagcgcgtggataagtgacccgcttttttccgggaacagccgcacgatcatctccgttccgatgagcaccacgcacaccgaaaacaccagtgcatacaattcacgcataagcacctcgcacacaaagcaccacagccgtcgagaccaccgccaccgcacccacactgcataccgccgcaatgagcagccgcagcgccgcagcacagccgtttaaaaacgacgcaagcggctttagacccaacacctctgccgcaagccccgcgcaaaagcaaatcaaaagccacgcggcagcctttatgcacagcggcagaaaaatcgcgagcgatgcaagcaacccaaatgcacccacgccgttttttacaagcgccgcgccggaaacgatgaccgaaaacgcatcggaaaacgcgctgcccacaatggggatcgcgccggagacaagcattttcgccgccttgccgcccgccatctccgcgctgttcgcaacaattgtctgtacggacaaaacgcccgtatataccgtgacggcgagcaccaaagcccatttgataactttatacagcgcgtccgtcagccgctttaaatcaaacgatgtcacggcagaagccacggaaaacgccaaaaacacacgcaaaaccgggatgagcaccgcgctgctcaaaaccgagacggcatttgccgccgcaagcgacagcgcgccgtaggtcggtgctgtcacggtgttccccgccgtgaaaagcagccccgcatacacgggcaccgcggcaagcagaaaaacggcagcagcatccgtcacgcgcgcggcctgctccaaaagcgaagccatcggcgaaagcagcgtcacggcggcgcacagcgccccgcatacggaaacggcgtatgaaagcccctttgcggcgaattcctgcacaagtctgcacagcacgcatgatgcaagcagcgtaaggagtgcccgcgccggtgctgaccactccgcacgaaagccctcggaaagcgtcgaaaacagctttgccgccgcgtcgggcgcaggtgtttccatcgggtctgccccgacgttctgcaaaagcgactgtgcttcttccggcagcgcctccataagtgtatccgccccgctgttttggtagagctccgcttcgtccgcgcgcacgggcagcgaaagcagcaggataaacaccgtcaaagccaaaaaaacgcgcaaaatccgttttttcataacaacagcacttcctgcaaaagcgagagaagtcgattcagcaacggcagcgccgtcagcagcaccgctgtttttacggcaagctccacaccgcttgctattgctgattcccccgcgtccttacaaagatccgccgttatgcgcccgatgagcacgatgccgagcgcctttaacagcgctccgaacacctccggcatgccggaaagctccgcccattcgcggaatgtcgaagtcagcgtttcgatctgcggcaaaatacacagaaaaacgagcaccgccgccgcaagcgaaaacagcagagctatttccttttgcccgcgttttaaaagcgcgccgcacaccgctgcaaacaccgccgctgccgataccataagcaccgcgctcatagcccaaacaccgatttaatcgtatcgaacagcgtgctgatctgcgtgatgagcatcgtcagcaccacaatgagccccgcaagcgtcgtcatcatagcctgctcctcccgcccggagcgaatgagcagctggttcaaaacggccacaagtatgccgatggcggcgatcttgaagatcagatctacatccatagctttgctttcctttccggctgttacagcaaaatgagggcggcggaaacaccgacaaacagtcccagcgccacgcacaatctgcctttctgggcaaggctttgctcggcggctaaaagtgcgctgcgcacgcggccttcatgcagcgcaaagtacgccatttgcccatcgaggtcggtcttgccgaacccgtcaataaacgcggcgcacagcgcttcatccccgcggtatgtaaaaaatgcatgtgccgccgctttaaacgccgctgtgcaatccatgttttcggaaagcacccacacgcgccccaaaaaagcgttttcgcggcacagagagagcagcgcgtacaggtcgcccgccgtataggccgcggcgtttttcagcgcaaaaagcgcttccaaaaagatgttcagttctttttcacgcatttttagccgcgcggataccgatgacccggcggtcgccgcgcacagaacaatcaggatcgccgccgttgttttcaagaagatcacccgccaaaaacagcttttccactttcgtcggtgcacttcgcccgtacagcagtgccaccgtttcaaacgcgccgagcgatagaatcccacggcacagcggtctgcaacacagctcatgtacactgcccgcgtggatgctcgcaatcagcgccacccctgaaaacgatgccgcacgtatcgccgaaagatcgttttcgccgagctcatcgcagacgatgtactccggtgaaagacaccgcaccgcgtgcgaaagcccctcctgcttcgggtagccctgcaaaatatccgtgcacgcgccgaggtcaaacccgtccgcactcagctcaaaccgctcgtcaagcaccaccacgcgatgtcccgccgtaccgatatatcgtgcaatgtcccgcagcagcgtcgttttgcccgaggacggcgcgcccgcaagcaacagcccgcggctgaggtctacgccgtagcgcagcacctcctctgcacagccgcgcttctctcgcgggatacgcacagaaagactcgtcacgtcgcgcaccgttttgatgccgcccttttcgatcaccgccgtaccgccgatgcccacccgcagcgcgcggtctgcggagacgaatccgccgcgaatctcctccatatgactgtaaacagaatacccgcacagccgcaaaaagatctcctccacgtcctcgcgtgtcgctgtcacattgttttgcgaaaaatactgcgccgtgccgccgtcttcccgcaaaaacaaaatgcggtcgccgcagcacagcagcacaggcttatccacactgatacgaatgtcaaacaccgcggcgcgcaccgccttcggcaccttttcaagcatcggtgtaaagcgcccgagcgggcggatcgccttttcaaaatccatcgcacacacctttctttccgttccgtatgcccaattctatggacgtgccgccgggtttagaaccaaagtggaaaaaacgggccatcgccctttttataaacatgcctttatgcctttgaaaagtgtgcccgaaatccgccgcgatttttcaaacatgaaaagcaccctgcaaggccaaaagctttacaaggtgctttctctatggagcaaactatttactttgaaagtccgttttgatacaagctgtaaaagtgattcgtcggcccagcgccgtgcccgagctcgagcgcgtgctcgatggcgcacgtcatatagtctttcgcacgcttcaccgcttcagcgggtgcatatccaagcgccaaattcgaggcaatagcggaagacagcgtgcaccctgtgccgtgcgtgttcttcgtttgaatgcgtcttgatgtaaagcttatatgctgttcaccatcgaacagaatatcgatcgggtcgcctgcaaagtgtcctccctttacaagcacagctttacagcccattgtgtaaatcaactttgctgcagcacacatatcgtcttccgtctcaatgtgcatcccggtgatttcctccgcctcgggaatattcggtgtcagcacgtcggcgagcggcaaaatttccgctttgaatgtctcaatcgactgcggagccatcagtgccgtcccgtctttcgcatacatcacagggtcaacaacgacgttcttcggacagtatttgcgcagcttttccgccacagcagacatcacctccggcgtcggcagcatgccaatcttcacggcgtccgtaccgatatcttcatagattgcgtccacctgcgcgcggacaatctccggcgcaatatcctgctttttcagcacatgcacggtgttttccgccacgacggatacgatcacgctcatcgcgtacacgccgtgtgcggatattgtcttgatatccgcctgaatacccgcgccgccggagcaatccgacccggcgatggtcagtacgcgcttcattgcacgcatcacagcgaaagctcggaaactgtgaggttctgcacctcaacgggatcctcggcgtggatcgtgaacgtcggcttcgtctcatccagcacatgcgcgatgaccatgtttgcaacgccgttcaaataaatctctacgctgtttgtatcggtaatgatgtccaccttcatcggctcgtttttcaggcgcggcaacatggattctccgcaggtcagaccgtttttgtcgagcttcatctcaaggccgtacaagttgcacgtaaggttgccttcctttacagtaaaggagatgcggcaggttttgctgccgagctcgtgcgtgcagtgtgtcaatgtaaagtcgtcaagcttgtcagattttacaaccagattttctgtgctcttgaccggcagcgcagagagatagtagcggtcgccgtgctttttcagcgtcatttcggtcggcgtacacatggagccgttgaacggtgcgccgggaatatcgctgcggttccacgcaaagcggatgaccggcttgcccggctcgtagtaatacgtctgcgccgcatacgactgcgagttatacgaaagctgcccgaccgactgaatcggctggtaaaggcctttttcatcaaaatcgccgacaaaatacatgtcgtgcgcaccggaatagacccacagcgttctgccgtcatctgctgtaagcggatagagatccgggcactcgtcatcaccgggcagatcaaatttctgcagaagctcccagtgcagtaagtcctgcgacgtgaagattgcgtaagtgcgctccacaaaatacagtgccatcagccagcgcgcgcgctttgcgtcgtaaataaccttcgggtcgcggttgccgggtgcaatctcgtcgatcagcggatttttgtcatactttttcagcgttttaccgccgtctgtgctgtacgcaaggcactgtgtgctctttttttcgcccgcgcaggtgtaaaagaacaagattggcgtttcatcgccttccttgaggccggaaacattgttgtgatcgactaccgcacagccggaaaacattgcgccgtccatgtcaaggaacatcgcttcttccttatattcccagtggaaaagatccgggctcacggcgtgaccccaatgcatgttgccccacagtctgccgtagggattgtgctggtagaaaaggtgatactgtccgccgtaaaagcacagaccgttcggatcgttgatccagccgcgctccgctgtaaagtgcagctgcgggcgcaagacggtctcttccactgtaagcggcgtcatggtatcctcaaacaccggtgtaaatgcgcactccggctctaccgtgacagtcatcgtcttaccaaggtaatcgcgcaggtcggcataataaaccgcatctgcgttttctttcgtataaacggcatcgaacttataaaccggtgtgccgttttcagaaaaagtaaatttgtgcgaagtgccgtcaaatttcaccggcacgcgtagaaaacgtttgctgactgtaatttccataaactcaagctcctttagccgttattggcgcattaaaatgcatgcaccacatttattcgaggatattgtagcacaccgcgcgaaaaatgtcatgcatattttgcttaaatttgcgaatttttccgccgcgcaaagccaaactatgtgcgctgcagatctgtaaaggaaaggcggtgcaaaggtggcaaaacacatttggaaatttgtaaaaagtaaaaagatatttatcgtattactaatactgtatacagttgtctttattttggcggttcgatttatttttcatattctcccgattttgcttggcgggctgcttgggtgggtcacagcaccgctatgccgcctgctggaaaaacggctgcatctctcccataagcgcgccgcactttgcactgctgtcaccgtttatagcgtttcactcgtccttcttgcattgcttttcacgcggctcatccgggaaagcgccacgttttttgcttccgggcgatactttcgctacgaagcactcgcccccgccgtgcggtcgtttttggagcgcacatggcaggaattgccgcagtggatctccgctgcgcagaagaatttttcgggtaacatgggtgccgccatgcccgcgctgcaaggcaccgtaaaagcgattttgctgctgcctgccgtgtttttaacgctcacgctcatcccggtttttgcgtatctcaccctgctgtaccgtgaaaatttgctgtctctcttaaagaagctcatcggtgaaaagtgcgtagaaaacctgcaaaaatccgcaaaaagcgaatcttccgtcgggtttgtttctgcctatgcactcatttacaccatcacgtttgcggaaagctttgtgatgctccacctgctgcgcatggaatacccgctgatgactgccgccgttgtgacggtctccgatattttcccggtgctcgggccgggaactgttttgctgccgctcgccgtttaccgattgttatgcggcagcgcggcgcaagcactcgggctcttcatcgggtggatcattctaagcgtcattcggcagattattgagccgaagctgctcgccaaaatgacgcgcaccccgcccgccgtgatgcttttcgctgtgtattgcagccttatcagccgcaatttttggctcatcccctacaccggcacctttttcatgctgatcggcatgttgaaaaaagccggaatactaacaataaaatccaaatcaatataaattaaaaaccgcaaatttacaaaagcagaacttcaaaataccattttaaaattattgtattttgataaaatacattcaaaaatcggaagtgccgtcaaacatctgcttccgttttcataaagccttctaaaatgcgcaaaccctcctgcgtgttttggcccaagatttcctgtatcttcttgaaatcacgcgctttgtgcatgacgttttgcagcttgaaaaattcttccttgccgtgcttatgaatgaacagcgcctgcgccttggcggcggctgcgccgtcgttgtccttcgtgtaaaatcccttttcgcacgtcagaatttccacgcagtcatagcaaccgtcaagcccgttttccttacagcaggcagcattgggacatacgcctttctcgtacagcgtgccgtaggagcaacagttaaaatccgaccggcagccgccgcaccactgccctaaaaagcaatggtcgcacgaaagcccgcaatacgccgtcgggtcggtgcctgtacgcgctgcgcggacgatctccgatttataccgggctccgttttttagacggcgctccgtttccggcccgccgtctaaaagcgccttgcagtaaatacgggtctcgtcgccggaattgtcttttgcggtctctaaaaatgtatagccgtatttttcatacagcccgatgtgattggtagaaatgtaggtgtacttccgttccatgatggccgcgatgccttccgcgcagtccaaaagccgaccggcacagtgctgcccgcggtactccgggaatgtatacacaaacccgacccacggcgtgtatgatgtcggctgcacgtcgtcaagcggagcaagcgtacagaacgagacgagcttgttgccgtctgccagcatcaaaaccagtgttgttgcgccgacaagtgctttcagcttattttctttcagcaagctgtaaaggtactgccccgctccccaatcgctcttttgaatctcacggagccagtgctctttattttcgcaggtgaaatattcgagaatttttctgttgtttttcttttccatatcgttctcctctgaattaaaactattctcccgtatttcccagtatagcaaaacctatgttcggtgtcaaggcgattttgaaaagatgtccgcttttatgcaaaaaagcaagagaaggacgatctatccctctcttgctctgtattttgtataaaaattttacgcgttcagcagcttttctgcagcggcaagcttgatggcgcaacagaaaacttccatggcctgttcaagctcttcaagcggcgggaacgacggcgcaagacgaatgttactgtcgtgcgggtctttgccgtacgggaacgtcgcaccggcatcggtcaggatgacgcccgcttctttacacagctgcacgacgcgctttgcgcagccgtcaagcacatcgacgctgatgaaatagccgccgttcggcttattccactcggcgacgccgaggtcgccgacattttcctccagcatcagctcgcacaggcggaacttcggttccaaaatggcgcggtgacctttcatgagggcgcgcacaccgttgatgtcgtgcaggaacaacacatggcgcagctgattcagcttatccgggccgatggtggacgtgagcgtgtgctccttgaaatcgcggatattgttatcgctcgtggcgagaccggccacgccagcgcccgggaacgagatcttggacgtagaggcaaaaatgaagatctgatcttccgtgccgttttcaacgcagagatcgtagatattgagcagcgtatccggcgtatcggtgaggtcatgcacacaataggcgttatcccacatgattttgaagtcctttgcagccggttttaatgcggcgaaacggcggacggtctcatcggaatacgtgacacccgtggggttcgaatacttcggcacacaccaaatgcccttaatggagtcatcgtccttgacgagcttttcgatgagatccatatccgggccggtagcatacatcgggatgttgataagctcgaagccgtaatactccgttacggcaaagtggcggtcgtagcccggcaccggacagagaaattttttcttatccagcttgcaccacggcgtgcagccgttgtaaccgtgcgagaagccgcgggaaataacctcaaacatcatcatcaagcttgagttgttgccgagaatgacctgcgaagccggtacgccgaccatatcggcgaaaatgcgcttcatctccggcagaccgtcccaaaggccgtagttacggcagtcatcaccgttggaattcgcaaattcgcttctcgctttcagcgcttccaaaacgccgagggcgagctccagttgttttgcgctgggcttgccgcgcgccatgttcagcgaaagattttgggcctgatagcccttatattctgcggaaaggtcatcgaaaaccttctgtaattctgctttgctcaagtttgcgtacgccacgaaaacatctccataaataagattttgaattgaaaaataagtattcaattcatttttacgctccaatagcgcctgaaacaattcttattttaatacaaataagctaaaaatgcaagccttatttataaatcttgcattttcctcgttttgcacgattgtacgacgtgttttcctgcttttccgttcattctgacaagcgtataacaaagcaaaaaccggcacagcgaactgcaccggcaaaagacttgcttttatgaaatttagaactccgcagagcccgttgtgcgcgggaacggcaatacgtcgcggatattggagatgcccgtaaggtacatgaccatgcgctcgaagccgagaccgaagcccgcatgcttgttgccgccgaaacggcgaaggtcgaggtaccaccagtaatcctcctcgttaaggccgagctcgcgaatacggttcagaagcacgtcgtatcgctcttctctctggcttgcgccgcacagctcgccgatgcccggcacgagcagatcggtcgccgcaacggtcttgtcatcgtcattgaggcgcatgtagaacgccttgatctccttcgggtaatcggtgacgaacaccggcttgccgaactctttttcggtgaggtagcgctcgtgctcggtctggaggtcgcagccccaggagaccttatattcaaagttgtcgttgttcttttcaaggagctttacggcatccgtataggaaatgcggacaaaatcggagtttgccacgtgctccagacgttctttgagacccttatcgacaaactggttgaagaagtcgatgtcctgcgggcagcgcgccataacgtctttgatgatgtacttaatcatggcctccatgagatccatgtcgtcgttgagatcagcaaacgcaatctccggctcgaccatccagaactctgccgcgtgacgctgcgtgtaggagcgctctgcgcggaacgtgggaccgaacgtatagaccttaccgaacgccatggccatgcactccgcctcaagctggccggaaacggtgagggacgtctgcttgccgaagaaatccttactgtaatcgaccgtgccgtcctcgtttttcgggacattgtcgaggtcgagcgttgtcagctggaacatctcgcccgcgccctcgcagtcactgcccgtgacaatcggcgtatgcacgtaggtgaagccgttctcgttgaagaacttatggatggcgaacgccgcagcggaacgcacgcggaacgccgcgttgaagaggttcgttctcgggcgcaggtgcgcgaccgtacgcaggtattccaccgtgtggcgcttcttctgaagcgggtattccggcgaggacgcaccctcaacggtaatctcctccgcctgaatttcaaaaggctgcttcgcttccggcgtgagcagcagcgtaccggtgacacgcagcgcagcgccgacattctgggaagcgatctccttgtaattttcgagtttttccgccgtaaagacgatctgtacgcccttaaagcagctgccgtcattcagatcgataaatccgagcgctttggagtcgcggatcgatctcgcccagccacagaccgtgacctgcgtatcgccaaaggtctccggcgatccgtagagggccgcgatttctgttcttttcatgatgaccacattcctttccgtgcggcacttaaactgcacacgcaaaacctacgctttggcatgcggcatttctccgcaaataatcacttttattatcatactacaaacgctatcggtttagcaaggaaaattttgaattttctccccgaaaacgcgatttatgcgcgatctttcttcaaaatcgcataatttgcgatgtcgcacagtcccccattgttctttgcaccctcgcgcatgatgccctcaaactgcatgccgcactttttcatcacgccgccggagtgcgagttgttcacatcatggcgcgccgcaatgcggttgaggccgacctcgtcaaacaggaaattaatcacggcaccgagtgcttcgctcgtatagcccttgtgccaccagttttggccgatgcagtagccgatctctgccgctttaatctcatcatccgtttttaccgcagcgatggtgccgataagcgcgttttcatcctttacaacaatgccccactggtaatagttgagctcctcatagtgcgatgcccacagcgcgaggatctgctttgttacctctacgctgctgtgcgtgggccatgtgaggaactttgtgaccccagggtcggacgcccagttgcggtacatcggctctgcgtccgcaagcgttaagcggcgcaaaatgagtcttggcgtttcgagtgtgacagtccccttgtgttccattgtgtttcctcctgatttctccagaaaataaaacagcgcagaccgttcattcagcctgcactgttcattgcgatttatgcggttaggttctttctaactctcaaaaagcgtatgacaatgtaggcccgcagcaagtaccgttacccatggcatttgcggactgcatattcatcataacgcggacaaagcggaacattgtcatacccctttctttcaaatttgttttgactatcctaccacagttctttcggttttgcaagaggaaaattctattttcctgaaattctccggaaaatcagcccaaaggcgcgtgtttgagcaatttgtggtccttttcgccgtaaaagcgcaccgcgttgatacggctgttaatcccattgcgcagctctgcgttttcgtaggcgtattcgcccgttacgatgctgatatctgcactcagcagcgcaaacatattgcttcttgcgagcgcgccgtaggtgatttccgtttttttatcacgcaagccgttgtcgctctgcacggcgtcgctgtaaaagagttcgaggtatttaaagacttcctcggcgcacttcgtattcggattcaccgccgcataggccgtgacgaacgccgtcacaccgcccgcatcgtttgggacggtcagcgcgtaggtgtcgtttttgttctgtgcgtaataggtaaagccatcttcgtaccatgcgccgccggtaagcggaatttcggcgcctgcaacttcattttcggcagtgggcacggaaaattccgatgcggtttcaatatccgcaaactgtgcgccgtaccagctcgcctgatgtgcctgcaaaacactcaaaacagtatcgtccttgcaggttttcagcgcgtcgaaagacgtatactgcgcgttcgggtcctgcatctgcgctttatcgagcagataagagttcacgcggtacaaaagcggcagcacgacctgctcaccgttcaccttgccggcattaaacaccggctgcacctgtgcgctcgggtcaagatagaggctgcttttgatgtaggtatcaagcggcagaaatgcgccgtctgccatactctgctccacatccgggaaaagcgcggacgtacaagtcgagttcggggcgtgcgccgccaaaataaacgcgtcgggcccgccgccggcttcgatctcggcacgaatttcttctatctttgcttcgcgctcggctccattgctcggtagcgcgacaaactccaccgggcactcgccgtataggtattcgtaaatctccgtgattggattattcttgaagaaatttttgctttccactaagatcgtcggctttttctcccctgctgtttgtgctttcggcgcgctttgaacgccgcacagcacctgcatcagcaccaagattgccaaaacgaccacacatttgcgtttcatatcgtccgcctccttttaaatcagtacagtaactcaataaagcgcgcgaatacgcaaaaagagaacgaccgcaaccgttctcccgatgttaaaagtatatgcgcgtttacgggaaaccgcttttgttacaaaaagaataacataaaagcgcgaattttgtcaatatcgttttagccaaaacggggaggcatttttatatgcaataaacaaaaaaggacagaaagcttgcactctctgtccccttctattcaagattgcgactaaacctataagccgagttctgtcttggacaaccatctttctcgtctgcacgttgccgtgcagctcaagccatctcctcgaaaccgccgggccgacgtatatgtttctccacgatgttgctccgaatagggtttacatggccgcgcagtctcctgcgcgccggtgcgctcttaccgcacctttccacccttacctgcaatgcaggcggtatatctctgttgcactttccctggggtcgcccccggcggccgttagccgttattctcgccctgtggagctcggactttcctcagatgcggcctttcggcgtacacccgcagctgtccggcttactcgcaaaatttgtgaaatgattggattttaatactggttttcggaaagcaagcgatttttctcgtcccacagcttctgggaaaggtccacatagtagctgtgcgggttttcaaatcgcgttacttcttcccacagcgtatcgacctgcgcgaggcaatgcgcgcggatggcgcttaaggcacgcggctgatacaggcactcgccgtttttaaacagctgggtgcgcaggcgcacggcgcggaaattctccacggtcttgcgcttccacgtgtgattcgggtcgaagattgtatacggcttctcgtcgtcgatgatctcgtcgttcagcgtgatgacatccgcaatggccttgtcggtctcgcggtcgaaaatacgccaaacctccttgaagcacggtgtggtgatctttgctacgttttcgctgatcttgatcttcggaacgatggtgccgtccggcttttcaacggccgccagcttataaacgccgccgaacaccggctcgctggaggacgtgatgagacgctcgcctacgccgaaggaatcgacctttgcgccctgcatgagcatatcgcggatgatgtactcatcaagggaattggatgcgcagatcttgcagtcttcaaagccggcgtcgtcgagcatctttctcgcttttctggaaagatacgtgatgtcgccgctgtcgatgcggatgccggccgggcggaagccctgcggcacgagtacttcgttaaagacgcggatggcgttcggcacaccggatttcaatacgttgtatgtatcgacgagcagcgtgcagttgtgcgggtattcttcggcatacgctttaaatgcttcgtattcgctgtcaaaaagctgtacccagctgtgcgccatggtgccgagcgccggaacgccgaaacggcggtcgctgatggtgcaggcagtgccgacgcagccgccgatatatgcggcacgcgcgccataaatggcgccgtcaaagccctgtgcacggcgggagccgaactccataaccgatctgccgtccgcagcgcgcacgatgcggtttgtcttcgttgcgatgaggctctggtggttgatggacagcaaaaccatggtctccacaaactgtgcctgaatgaccgggccgcgcacggtgacgatcggctcacccgggaagatcggcgtgccctccggcacagcccaaacatcgcaggtaaacttgaagttcttcagataatcgaggaactcttcgcgaaaaatgtgcttggagcgcaggtaatcgatatcctcctgcgtgaaagaaagctcactcaagtaattgacgagctgctccacgcctgccataatggcaaatccgccgccgtccggcactttgcggaaaaacatatcaaagtagccgatggtatccttaaaaccattggtaaaatagccgtttgccatagtgatctcatagaaatccgtcagcatggtcaggttaatatgatcgttagagagattctgtgccataattcagccaccgctttctgaaacgaaagcattcctttctccgggagtgaggtgtgtcctcatacgccttattttttaccacacacggcccaaaagcagcgctttaagccgatttgtattattataccgcaattttttaaaaagtacaatgaaaactcacggcaaaccgaaaaaatctgcatctgcacggaaaacggcacgcctttgcagaatgttttgttaaaagtttagcaccgcgcgcggtttacgcgttttttcggaacagaacaaaatccggcctgcaagcacagcagaccggatctcatttcggctaattattcggcttccggtccgacatcggtcacggagatggcgtcgagaattgtcttctccatcgcctgcttgccgtacttatcgacatctgccttgttcttttcgccgtgggtcagacagcctgcgccgccgatgcagccgccggtgcacgccatgccctcaatgaagttgttcggcagaacattcttggaggcacgcagcagagccgccttgcaggcttcgatgccgtcgcatgcgatggcgttgagcttgaagccttcgttgttctgctccttgagtgcttccacaaccgcgtcggacagaccgccgctgcgcgcaaagatgcggccgtagtaggaggcgttgtcgagcacgccttcttcgagcgtggtgaggtcgatgttgcggctgtcaaacagtgcctgcagctcctcaaacgtcagcgtgcagtcaatgtaccggcttgccggctcgccttccttgaactccatcttcttcgcggtgcacggcccgatgaaaacgacctttgcgcccggagtggtctccttgatgtagcggccgatctcagctgccggagacaggttgtgcgagattttatcaaccatggtcgggaagttcttcttgatgtaggaaacgaatgccgggcagcaggagcttgtgaggaagcccttttccgcaagctctgccgcttccttatacgcaaccatatctgcgccgagcgccgcttcgatgacatgatagaagccgagacgctggatgccggtgatgacctgaccgagctttgcatagctgaactggctggagatagacggtgctacgaccgcgtaaaccttgtagtcctgattctcgtggctgcccttgataaggttgacagcatcgagaatgaaggacttatcgacgattgcgccgaacgggcactggtagacacaggcgccgcaggagatgcacttttcgttatcgatatgcgctgcgcgatgctcttcgctgctcatgctgatagccttaatcttgcaggccttttcgcacggacgcttctggttgatgatggcgctgtacgggcatacctttgcgcactggccgcactctacgcacttcgacttatcgatgtgcgccttctgctgctcatcaaacgtgatggcgccgcggcggcatacgtcctcgcagcggtgtgcaagacaaccgcggcaggactctgtgacgacatggccgctgaccgggcactcgtcgcaggcaatctcgatgacttcgatgacgttcgggtttttcttgtcgccgcccatagcgagcttgatgcgctcctcaacgatggcgcgctctttgtagatacagcaacgcatcgtcggtttttctttgacgatcagcttcggaatctcatagtatgcggcgtcgaggttatcctcaaaaccgtaacgtgcgacctcgcgcaggaccttatacttcaaatactggattttcgtatcaaactttctcattcttcacatcaaacctttcttgctttggacagagatttccttttctatatttttcaaatcttccttagagtgccgagacactctatacacagaagccattctgcgtttagaagtaggataccttaacttttttgcccatcttctcgagcgaggtgcagagattttcgaccaactgcatcttgatgttgaagttaatgggcagattcgggttctggtgcgccgggtttaccgcacgaccgacaaagaagttgatatcggtcgcttcttcaaacagcatgcgggcgatcatggacgcgccgtcgcgcttatagccccactggctgtacttgcggttttcctcaaggtaatccttcgcgtactcgacgaccttgctcatggtgatgacgccttcggtgacaaggtcgagtccttcgaccttcgccgtgggcggaatatcggaatcgaggtaatcgagctgtgcgatgataggctttttgaggtattccgccgcaagcgtagacgtggtaccgccgcagacgatccgcttaccgggtgccgagaagaacgcctcgtgcattttcgagagatcttcgggtttagacggcggtccgatcatcaggttcacgcagcagcgctcgcgcactttgacgcagaccgcggtggtatcgtcgcccggctggccgccgtagagcttgttgcactcatcgagcagcagcgcattgagcgtttttgccgtgaagctttcgtcgtacatcatctccatatagtcgatgatgtccttgcgctcccagccgaaattcagcgacatgccgatgccggcatgaatggcgccgtcgctgaacgcgatgaacgtgtcatccttctgaatcgggatgcgggtcttatagatcgttttgccgccgatctcgacggcttcgcgcgggtattcccagtttttgccgttgcgcagcagaaccacgaacgggttatcatactgaatgatctccgcttcttcattttctatgattcggatgatggtgaacgtggaatacgccacgccgcgcaccgcgcagatgggcagtgtagacgcaatggtctccacgcagtcttcgacatgcagcccctccgccatcatggtagagatgatctttgcggtcagcgtggaaagaatatttgccttaacaccgctgcccatgccgtctgccagaacaaccaccgtggaattttctccctgcggaacgatgtcaacgtgatctccgcaaagctgttcaccttttttgttgaggctcatccagccaatatctgtacagagattattcatcttgcagcgattcctttaacttggtgagcgcgattttcgtttctgccgtggtctcgccgagcagcgatgcgatctcctgtacgacgcgcatctgcttttcgatcacacggttggtgacttcaatcgtctgctgccccattttttcttttttcaggtgttcgttcatttcatccgtcacatcacgcatgatgcacatgataatgtgatagttgcggtcgtagagcacggtctggtcgacatacttgccgtattccgcaaggtacacacgctcgtcgcgcacgccgcggccggactgcatgacgtcgatgaagacgcgcgggtccagaatgcggatgacctgcttgccgagcacctcggatgtatgcttcacgttcacgatcttacgcgcggcagcgttgatctgctggatttccagcgattcgttcagcaccaaaatgccgttcggcgtgttgttgatgatggtatcggagaacgactgcgctttgccgagcagatacggcaggcacatggaaatctccgccttgccctgataaacggcgatggccttttcgcggcaggtattatagccgcaggcaccgcagttcaattcctgctccgggcgagtcttgcccatctttttgaggatagcctcaatctcaatgttgcccggcatgaggtgatacaggctgatataatcaaaatcgtgcttgagctcttcggaagccggctgcggcaccacaaagtcctttttgccggcatacttattgaccgcgataaaatcctgcacaggctgacgctgaccctgatccatagccgggccgttgatgcagctgccgaagcaggcgctcatctcgacaaagcagttctccattttgccgctcttgatgtcttcaagcgcgttgatgcagttttccacgccgtcgatcgccatgtatgtatactcggggtcatcgcacaccatggtgcgcagaatgcctccggtcgtcgggaacaggcgcgcacggctttcttccgtatgatcctcgcctgcttccacggtgatgccctctttttcaaaccaagcggaaagctcctcgaacgtgagcacacagtccacatacgggctttcgtcggcctctgcctttttggagatgcacggcccgatgaaaacggtcttcagttccggggctccctccttcagcatcttacagtgcgcctgcatcggcgacaaaacatgtgcaaggtacggcagagcttccgggtaatacttctgcacaagcgtattgacagagtggcagcatgtggaaatgatgacgctctgccgacgctctttaatgattttttcgtattcggtcttgacgacggacgcacctacggcggtctcctctacccggtcaaagccaagctttttgagcgccgcacgcatcgtttcgatggtagcgcccgggtaatttgctacaaaggatggcgcaaggctgactgccacgggacattcacccttgacgaacatctccgcaatcggtacgtcatttcggatttcttttgcgttctgcggacatacgacaaagcactgaccgcagagaatgcactcgtcttttacgatatgcgcctgactggattgaaaacgaatggacttgacagggcaatgacggatgcacttataacagttctgacagttagactttttgagcttcaggtagtctggcataccctattatcctctctttaacttatcctcttttagcgttcgctttcgctacgaacttttcatccttgacgatgaatctttcatgggtaccgctgccgatggggccgacctcatcaaacgctttaaccgtgaacaccaaacggcggttgtccacttcggtaagttcgcactctgccgtaacatgcatgctaagcggcgttgcggacgtgtgctgcacattcatcagcgtgcccacagtgcccatgcccggctctaattccggcgcaacgcacttccaagccgcctcttccatcagcgcgaccatagcgggcgttgcaaaaacgtccagcgtgccgcttcccatggctttggctgtgttcttctctgtaacaacggtctcggctttgcctttcattccggctgtcaacaacttaatcacccttacttcctattttctgctgcgttttgccgcacacagcagcttacgcacggagagccgatgcaaaaaagctcttgcaccggctaattttttgtttcttatgcttactgaacctttgcgagaatctctttctggaagaattcctcggtggtgtcgggagatacggaatgcttctcgccgtctacggtgacgttgacgccgtttacgcagtcacccatgcagaaagtgccaccgagttctaccttatcttcgaggtggttttcctttacgagcgcctgaagcttttccacgacctggcgggaacctttcagatgacatgagctgccgatgcagatgataactttcattctaatcaaactccgtttcttagtttttggtttttacttatttgtttatataatggcatggaaaagggatcttccttttctgccaagctaacttaggtattggcgtctaatttctccttgagctgcttagataagagcgcaagcgacgcggcaaggttttcgttatgtaccaatatgccctccggcgcatcgagatgcacgggcgcgaaattccagatagccaaaattccgctttcaatgagcaagttgcagatggcctgcgcattttctgccgggactgcgatgatgccgatgcgcacgcgcatgcgctcacacagatccatcagcttatccattgtcagaatgcgtttgccgccgtaatcttcctcacatacctcttcatcgatatcgaacgcggccacaatgttcatgccgcagtctttaaagccgccatacgtcaaaagcgccttgccgagcttgcccgcgccgacgatgatagcgtcatcaacatcattgtagcctaagaattcctcaagctctgcgatgagcgcctctgtgttgtaaccaaccttcggcttgccggccgaactgaccgctgcaaggtctttgcgcacaacgacatggttgaggcgcagcgcctctgcgatggtcgtggcggaaatgtgttccggcgtgttttcgccgagctgcttcatataattcaggtaaagcggtaacctgagcagcgtttgttttgaaatgctgcgattcaccatgacgcagccaacccccatccaaacagaaaatcaaaataaaccaaacatctaatactttaacacaagaaacgaccaaatggaatacccattttcaaatatcgatataatttcatcgatataaaagcaaaaaagccccgacgacacgttaaaaaacagacaaactaaatcaaatacaaacttcggcggatttctactccgcatgcggcgtgccgaactttgcgctcaataaatcgcgctcctcatacaacttttcgatgaactgtttatcgaccgccgtatatttatattcctttttggacgtcaaaatatctctgtacacgcggtgtttgttgccgcggcacggttttaacacaagctcatagcgttcaagctgttccacatccgtcggcgagacccacatatatgtgtgcggcaccgtcgccaaaaggtcgagctgactgccgcggctgtaaacatacacgcgtttggtgacgttttcgtccatctctgcctttttgatgtcggacatcggcagcgacggcacgaacggatcgccgtggcaaatttcgatatagccggaaaggtcttcgatatccacaacatccttttgcgagagcgggtcgtttttggagatgagaagctgatactcgaattcccagatgttctccgacttcatgcccttatcgcgcagcatgttcgtaaaaaagctctcaaagatcgtctgataccgcacgatggcaaggccgtagttttcctgtaccacgttgcgaatggcgcgcatggcgttcgtttctttgaaattaaactcaatttcctttgacatatccgcctcacggacaaacttggaaaacgcatccgcaatatagctggcgcgcggcaccgagatgctgaacttcagcttattattcttttcgggcttataaagcgactccatttcttcgatctgtgccagaatactcttggcgtagccgagaaactcctctccctgcggtgtgggcacaatgccctttgaggtgcgcttaaagatcttgacgccgagcgtctcctcaagctccttaatcccgcggctgaggttcggctgccccataaaaaggttttcggcagccttagtgatggatgcggtcttctctacttccaccgcatatttcagatgtgcgatgttcattgcgttctcctacggacatatttgaaagggcataacactatttcgattatattataacatatcccgctctcttgtcaaatacttgtgcacaaaaacagcgtaaaatccgaaaaaatcggcggctaaaccgcattttcgtccgaaagcaggggtgcaatgcgcttttcggcttcgagtactgcgcgggtgatctgttccgtcatctcggcgcgtatggtacacaccgctgcaagggtatcggcatccggagtgttttgccgtgcggtaacagcttctaaaagctcgtctaagaacgcgtccacctcggcggcatcgtaggtgttgccgcgcttaactgtaaagcgaacagcctttatgtattcaggtgtcagctccattttcggcctcctcccccggctttctgccgtactttggctgatatagttttttcggcagaacgcgcgagaatgcatagaaaagcgccgcgccccctgcaaatataggcaagagaacgggccaaccattcgcgacgaaacccatatgcggcaggcagaatgcgctcactttgccctctaaatattcatacggcacctcggcataaactttaaagtcctccgccgtatgccaaacgcgggcttcagggtcgttttcggtcagcgtcagcagcaatagaccgcgttcggtttgaatcgccgcgcagtcacccgggaaataatcttcggcaggcatatatgcgtaatatgcaagcgaatttacgggataacctgtacagccggtttgctttacagcaaatgcgcaccgtccgaacagaatcggcgaaagcaaaagcagaatgcaaattgtcgcaagcgcactgacaagtgatatagcgttacatattttgattgtaaagttgtttatctttacagggctaacattcatgattcgtgcgtccgaccgagcatctcctcggccattttgagttttaacggcgtgatgtcatcgccgccgataatacgggcaatctcgcggacacgcgcgtctttcgtcagcgtgtgcaccgccgtgtacgttttgttgttttcctgctttttgacgataaacaggtggttatccgccatagcggcgatctgcgccaggtgcgtgacgcagatgacctgcgcgtttttggagacgcagcgcagcttgatgccgaccttattcgccgcttcgccgctgatgccggtgtcaatctcatcgaagatctgcgtttcggccgcgccggaatcctcagacagcacggtgttgatggcgagcataatacgcgaaagctcgccgccagacgcaattttcgacataggcttcggatcctcacctgcgtttgcggagacgaggaactggatgcggtcgcagccgaaggctgtcaacggtgtgcgctcctgctccacggtgaagacgacgccgggcatgttgagctctgaaagctcctgccgcacacggcgggaaaagctctcacacgcggcgcggcgcttcgcggatagctgctttgcaagcgtcaccgcttcttttttcttctgctcatactgctgcaaaagcaattcttttttttcatcggaaaactcgatgtccgaaagctccgcacgggcacggtcgaggaacgaaagcatttcttcctccgtttcgccgtatttgaggctcaagcggtagataacttccagacggctttcaatctcatcaagctcgtttgcgtcgaacatggcgttatcgaggtaatcggagatttccgccgcggcatctgtcagtgcgtattcggcgtcgcggacatgctcggcaacgtttgaaagcgacggtgcatagcgcgccgcctgctcgagcgactctgccgcaacggatacggccgtgatggcgccgccattgtcctcatcgccctgcaaaagcgtgacagcttcgcccacaccgcgcacgatacgctcactgttgcggatctcatcgcggcgctcggtcagctctgcctgttcgccgacgcgcagctgtgcagcttctaattcttcgatctgatagcgcaaaatatccatgcggcgggacttctgcccctcgtcggattcgagcgcatcgagctcgcctttgatgcggcgcagcgccgtatacgctgcgcggtactccgcaagcagaccatatgcgcccgcaaagctgtcgatatacgtgccgtgcacttccggtgaaagcaacttgtagctttcatgctggccgagaatatcgatgagcgtgccgccgacggcgcgcagcatggaaacggtcgccgggatgttgttgagcttgcaggaggagcgcccgtgcgggcggatctcgcggcgaataagcaaactgccatcgtcttcaagcggaatatccaactcacgcaaaacctgctgcgtctgcggagaaacatccgtaaaaagtgccgaaacactcgcctgctccgcacctgtgcgcacaagctcctttgaggtacgctcaccgagcacggcgtagatcgcgtcgatgatgatggatttgcccgcgccggtctcaccggtcaaaacggtgaagcccggttcaaaatcgatagacgcctgctcgatgacggcgatattctgaatgtaaagctgcgtcagcatatcagaccccgccaatcagctttctgagctcgttctgcttttcctccgcaatctcatccgttttacagatgatgagaatggtgtcttcaccggccaacgtgccgatgaaatccgggaaatgcagcgtatccatagaggcgcagaccgcctgcgccatgccggtcatgcacttgacaacgatcatgttgccggccgcctccacgctcataaccgaatcgccgaacagcgaatagaacttggaggaaatgtcgcgggcattgtcgcgcccggtggaatatttatactttccgttcggggaaagactctttacgagccgaagctctttgatatcgcgggaaacggttgcctgggtcacgtcgaagccacaagcgcgcagattgcgcaggagctcctcctgcgtgtcgatatcctgtgctttgatgagctccagaattttggcgtggcgtcttgttttcatgctttctgccttccttcctgccttttaatttctgctttgcataaatttgctgtctacaatatcgtaaaaactgcgttcgtcggtctgaatgagctcagtgtaataggtcgagcggctgacggaaaccgtgtccgtcttatgaatgcgtatgggtgcgccaccgtctatggtgagatacacctcgccggaataatcgctgtccgtgctgaccgtgatggtcttatctgcgcagaacagcgtgctgcggttaaagagcgcatgcgggcagatgggcgtgaagattatgcattccgattccggatcaaccaccgggccgcccgccgagagcgagtacgctgtggagcccgccggtgtagccaaaatgaggccgtccgcgcggaatttataaagcttggaaccgtcgacggaaaagccgaaatcgtaaattctggactgtgcaccggagacgaccgcgtcgtttaaagcgcggtaggttgtatcccccttcacgctatgcacggtaacggaaagcatcatcaggcgacgcacacggtaatcgcccgtaaagagcgcctttaatttgtgcagctcgtccttctccacacctgccaaaaagcccagccgcccaaggttcactccaaggatgggcttacccgcaacggacgcgtgctttgccgtgtggatgatggtgccgtcaccgccgaccgcaacgataaggtcgcagctttccgccagtgcggcgtgatttttgcagaacgtgacgtgttcatactgcccgcggtgcttttcgtgcatgagtgtttccgcaccgttttcctgcaaaaccgccagaatttcccgggtgtatgtgtccgcatcgcgtttatccagatttggaatcaccgcaattttcataagcctcagtcctttttgtccagcgccgcgtgagatgcttccacgatctcgtgcggcgtgctttctgccgtatttaccggcgcgtcgcttttttggaggaacacaagatactcgatgttgccctccggtcctttgaccggcgagaacgtaagtcccagtacggaatatccgttttccactgcgaaatcgcagatcatctgcaccacttcctcgtgcacggctttgtcgcgcacaacgccctttttgcctactttttccctgccggcttcaaactgcggcttaataaggcatacggctttgccgccgtcctttaaaagcggacacacggcgggcaaaataattttgagcgagatgaacgacacgtctacggagaagaagtcaatctcctccggaatttgctcgcgtgtgagatagcgggcgttcgtacgctccagattcaccacgcgcgggtcggtgcgcagctgccaggcgagctgcccgtagccgacgtctacgctgtatactttggaggcgccgttttgcagcatgcagtccgtaaagccgcccgtagatgcgccgatgtccatacatacggtgttttcgagcttgatcggaaacagctgcatagctttttcaagctttaagccgccgcggctgacgtagcgcagcgtgttgccgcgcacctctaaaactgcgtcttcgcgcacggtgtcgccgggcttatcaaatttctggttatccgcgtaaacacagcccgccatgatgagcgtgcgcgctttttcgcggctgggcgcaagccctttttcgtaaagcaggacgtctatcctttttttcatatagaaactgcctttccatctttcttttttgcggtttgcaacgccatgcgtatggcgttcaccatgccctctacgtcaagaccgagcttatgcagcgtgcggaacataggcgcgtgcttgatgaatccgttttcaatagcgtgcacttcgtagtgccccctgaaattgcgatccaacagcatggcgccgaattcctccgcgatgccgccttggcggacgccctcttcaaagaacagcaccgtgggacaccttaagaccgcttccaccgctttcggatcgatcggcacgatgcgattgagcttcacgatgcggcactttatgccctctttttcgagcgtttccgccgcttcgcacgcaaacgagaacatacggccgtaggtcacaagcgtgacagaagcatcttccgtgccgaacacataaaacggcttgccagaaagcgtgtagttttccgggcgatacagctctttgccgcgcgggtagcgaatagcataaaggcggttttctcccttaatacagtcatcaagattgtccgaaagctcatcgtaatacgtcggcgcgtacacgtggatgtccggcacggtacgcaggaacgcggcatcgaacacgccttgatgcgtctggccgtcttcgccgaccacgccggctctgtccacagccagaataattttgagatgctgcaaggcgccgtcgtggatgagctggtcgtacgcgcgctgtaaaaacgtggaatataccgcaaaaaccggaatcatgccgccgcgcgccagaccggcgcagaacgtgacggcgtgttcctccgcaatgccgacatcaaagaaacggctgcggtatttttcgcggaaatccgtcagaccggtgccggattccatcgccgccgtaacggcgcacagcttctcatttacaccggctatcgtgcacatcgtctcgccgaacgcatgcgaaaaacccttggcaatggcttcgcccgcgcccttttcgcggtcaaatgccgcaaggccgtggtaaacgctcggagcgttctccgcgtatttatatccgcgtcctttataggtgcggatgtggatgagcaccggcttatccatatcgcgcgccatcgtcaaaaccgacgtcaaggtgcgcaggtcgtgtccgtcgaacgggccgtaataattaaagccaagatcctgaaagatcgtggtgttgaaaatattctttttgatttggtttttcacgcggcgcacttcggcagccatgtgctcgcccaccttcggcacgcggcacagtgcggcttcgacgctgtcttttgcgttcaaataccccggctttgcgcgcacataggaaaggtagcgcgcaatggagcccacgttgcgggaaatggacatggcgttgtcattcaaaatgacgatcatattgcggttgatgcggcccgcattattgaggccctcatacgcaaggccgccggtcaacgcgccgtcgccgatgacggcgatgacatggccggggtcacccgcaagtgcctttgcaacggaaaggccgagcgccgaagaaatggacgcgctgctgtgccccgttgtaaacgggtcgcagtcgctttcttctctcgacggaaagcccgaaagcccgtcctcgcggcgcagcgtggaaaacgcttcttctctgccggttaaaagcttgtgcgcgtaggattggtgccccacgtcccacacgatgcaatcctccggcaaggtgaacacacggtgcagcgccacagtgagctccaccacgcccaaattggaagcgagatggccgccgttgtccgccaccgtgctgatgatctcttctctgatctcatcgcaaagctccggcagctcgtttgccgcaagctttttcacatcgttcggggccttgattttactgagcaatctgctcatacttacaccagtccgttctgtatttttgctgccgttacggcgtttttcatcagcattgtgatggtcatggggcctacgccgccgggcaccggcgtaaggtagccggcgaccgcctcggcgctttcgtaatcaacatcgccgcacagcttgccgttttcatcgcggttcatgccgacatcaatcaccacggcaccgggctttaccatatcgccggtgacaaatttcgccttgccgaccgcgacaacgagaatatccgccgttttgcagatctctttcaaatttttcgtgtggctgtggcagatcgtcaccgtgccgttttcatgcagaagcagcatagccatcggcttgccgacgatgttgctgcggccgatgacgacgcagtttttgccgtcgattgtgacgccggtggagcggatgagctcgatgatgcccgcgggcgtacacggcaaaaatgcgaaatcgccgatcatgatacggccgacattttcggcgtggaacgcgtccacgtcctttttcggatcgatatgctccacgatgagcgcttcattcaagtgcttcggcagcggagactgcaccaaaatgccgttgatcttcgggtctgcattcagcttttcgataagcgccaaaagctcctcctgcgtggtgttttccggcaagacgtgttcctcggagtaaatgccggtctcggcgcaggccttgcctttgttgcgcacgtagattttagacgcggggtcttcgccgacaagcacgaccgccatgccggtctgaacgccctgcttttttaaagcggcaacttcttcggcaatttcgccgcgtacctttgccgcaacggccttgccgtcaattctcactgccatcgttcttctcctcgctttccccttctgccgtttcattcgcttcttcggcttcatcagacggctcttcggaagtgtttgcatccgcatttccttccgttttttcattttccgcctcggcagctttctttacgccggtgccgactgtcatgtgctcctgtgcttcttcggcgctcatgccggagaaaatggtgctttcggcagtgtcgtcaatctcgaccttctccgccttgtcttcaactgtcaggccggccgcttccatcgccttgcggctaccgcagcccgtaagcttatggcagttgcggaacacgatgagcaaaacaacagcgacgagtgcagaagccgcagcaagcacctgcgaaacgcgcagatcgatacccggcaacagcagactgtccgtgcgcagaccttcaatgaagaagcgcgtcacgccgtaccagatgatgtataataagaacgtctggccgtcataccggcgcaggtggcgcgtgaataaatgcagtaaaacaaagcctaaaaggcacaaaatcgattcgtaaaggaagcacgggtgcacattgcctaccacttctgcggcggtgcggtcactgtacatgccccacggcaggtcggtcgcgcagccgaaagcttcttggttcacaaagttaccccagcggccgacaccctgaccgatgagatagccaagagacgcgacatccagcacggcgaacaggttcatcttgcggatcttcgcgacgatgccgccgcacagcatgccgccgatgatgccgccgtaaatgccgaggccgccctctttgatgttgaagatttccatcgggttcgtgatgtacttgtcgcccgggtagaagatgacgtagtaaagacgcgcgccgatgatgccgccgagcaagccggcgatgatggcatcgagcaggtggtctttattgatattcatttttttgcaggaggaaaaaccgtacagcaccgccagcaggaaaccgatgccgatgatgatgccataccagtaaatggtgaaattaccgacctgaaacgcgatgggattgacctccaccgaaattccgagattcgggaactgaacttgatgcgtcatgactgtatatcctttcgattaagcttcgtccaacggacgaatgatggaagctgccgttttgtccatatcaaacagcgtctgaatgcgcgcgttcacgtcttccgcggtgatctcggagaagcactcgatgtagcggaacagctcgcggtcgttaaagtgcatggtcatcacagcgttcgcgatgacatccgggctattgaggccggaaacatttgcgccgtaaagggacttcgcgctgcggcgcacgtcttcctccttgacaccttcgcgctttaaacgtgccatttcctcgcggatggcatcacacacggcctccgggttgccggattcgccgccgaacagcagcgcaccgtagcccgtgccctcaaaatactcgtagctgaaggaagcttcgttcacaaggcccgcatctaagagcttgcggaacatcggcgaactgtcggacgccataatgtcgagcagcacctcggtgacggcaaggtctttttccgtgcggtgcgcaccggttacggcctctttcacgccgaactggaacatcgggcacgccacaggcagcttttcttcgacgagcggctgcacgatggtatcgggctcctcttcaaaaacgcgttccacctcaacaggctcgctctttttcagcattttgtcgcacagcgcgaggacttcctcctccgtacagttgccgcagacgcacagtgccatgttgttgaggttatagaacgtgttgtagcagcgataaaggtactccggggtgatttccgcaatgctctccaccgtgcccgcaatgtcgtccttgatcggatgcgtgtggtacatggcgcgcagcaggctgaacatcatgcgccactgcgggtcatcgtcatacattttgatttcctggccgatgatgccgagctctttttcaacggtctgctttgtaaaatacggggactgcacgaagtcgagcaaaatctccaacgcctgctctgcgttttccgtgcaggagaacagatagcgcgtcgtctcaaaggacgtatatgcgtttgcggaagcgccgatctcggcatagcggccgaatgcgtcgccgtcttcgctttcaaaaagcttgtgctccaaaaaatgcgcgatgcccgcgggtgtcgtctctgccttatcctcgtcgctgcgtttaaagaccttatcgatggagccgtagcgcgtgccaaacaccgcatacgtactgcgcatttccgctttcgggtatataaacacggtcaggccgcttgcgtgtttgacgcaacggtagccgtcccgaagaagtttgctttccacaagggtattcttcatttctgcgctcattttgccgctcctttcagcttatagaccgtatcgagcgtgacgcgctcggcggcgctgacgatctcgtccttcgtgatgttcatgatacgctccgcatattcctccggcgtgtggagcttaccctgcagcatgccgctgagataccatgtctccatggatgccgcggaatctgccacggcgttgtagctgttgcacatggcgagctttgcaaagagaatctcatcgtccgtgatattgccctttttcatatcgttgagttcttttaaaatcgcttcttccgtgcggtcgaggtctttcgtttccacgccgctctgcacgaacatgacgttcttcggcgtatcgtggcgcgcggcgcagtagtagcaaaggctctgcttttcgcgcacgttcataaagagcttgctgctcggtgtgccgccgagcacaacggacatcagctttgccgcaaggcgctcttccggcgtggtgccgatggcaaagcccatgacgagcttagactgcacaacgggcatttcttccgtcacacgctttacgtctcccgatgctgtgtggcgctttgtttcaatggacaccgcgtcgcgcatgcccaggcgctttacaagctgctgcgcaaagcggtcgtccgcaccgtcgccgattgtgaactggcagatctgcgcgtgctttacggcatactcccacgccgctttcacgccctcgcgggtcgcattcaagatcgcctcgcgcgtaccgatgcgcggcacacctgcgggttcgcccgcaaacatggtctgcacacagcgctgcatggcatacgtcgccttatcgttatattccgcgtcaagcgtctccaaaagctggcgctgctcctgcaaaaaaccgtcctccgggaacaggccgttttcgtcgcacagcggcgtgaacagaatgctctccagcatttcggaaagcgcctgctgcacatcttcgccgccgaacgcatacgggttcgcaatgccggctgcggcaagcgttaaaatctggttatcgcccacacgtgtgacacccggctgcaccgaagcgccgtacagctccgcaaggcgcttgccgaactgcgtgtaatcggggtaatcgcgcgtcgcacgggagatcatattcgggacaagtgcatataaagccgcattttccggcgtggtaagcggcaacacaaggtgtgcggaaacgcgtgccgttttaaactgcggcgtgctgctccagaacgcctgcaagccgcagtccttctgttcaaaaaaatgattattcatctctgaaattttccttcctgaaatagtttaaaaccgaattttcaaaaggtatagttgcataaatatgctttcgtattcgtattatagcacagcttttttcaattttaaagccaaagacggctttttcacaaaaaattcggtttactcgcgcacaaaaaaccgggcgcaacacttttcgatgcacccggctgaagctgcggtctcacttgaccgtattcaaattgatctcgatgtccgtgaattcttcccccgaaacataatcaaaccgctttgtaataacgagatgctcttcgtctttccaagtgagctgcatatcaaaagtatccgcccagccgccctcatacacgcgctttgacttaggtgtgaccgtaaagagcaataaattaagccctctgttctcatacacctccacaaacgtcgctccaccgagcgcaccttgatccacgttgatgatctccgcccgccgcgttccctccggcgatgaaacgctctgctcgactgttcttgccgaaaactgggagacaaatccgacaagcccgatcagcagcacgagcaaaaccgagatgatctcgaccagaattctaccgatcttcggcttgccgtacacaacggtgatcgacgcgctacacagcacgcagatcaaaagcgctatcaccgtccacgcacttttctgcggatggagcgaagacgtacggaagaacgaagtgtacgcgagcgcgtcgagcaaagacaacggcatcaggaaaacacacagtacgccgtccgattcgtcctttttaaagagccgcagaaacagcacaacggcagatataaccgccaaaagccacgcgtaaccgacatagctgaacggctcaagcgtgtaaccgattagctgcaagccccattttccgcatggcaaaaccgcttccaatacgaccaatataaccgtcaaaacccgtattgcccgtttcattttccttctccttttgaaatccacctcaaccgaggtacattttttcaaacgcctctatgctgtcaaacacattcggtttgagccccgctttttcgtattcctttgcatataagctgagtgcgccgtcaaactgcgccgcagccgccgacaggtcttttgcatcgaacttttcgagcaggtcaaatgcgggacggacacattctgcaccgcttttcatacatcagccgcagcttcagtatatcaaaagtgatagcaatgtgcaatattttctcttaatttgtggaatattttatataatttgtcaattctgttgtgcttctttaaacctttccagctccggcacggcgttcgccatttcggctttggcgttttcgcctgtcaggtggtctacggcgtacagcaccacgccgtctgcacccgcttcctttgcgcggtcgatctgctttgcgagcgtgtcggtcgtgttgagccatgtgccgttgtccgcatccgtgcccgccttgtacaccgcaagcccgatatacaatttgatgctcggcagacgctttaatgcgcaccaattttggagcgccgtttcaaacggcagcgcttcattttcaaagctgtaataaagctgcgggcaaatgtaatcgatatatcccgcctgcgcacaccacgtgtacacgtcagcattgatcatctcgttgttttctaaattgccctgcggcgaaatgccgaactgcacattttcattcgcttctttcacgcggctgtacacggcggcaatgagcgcgttcacgttcgcggtgcgccactcgtgcagcgtgagcggctcttccgtttcttttacatacgccgcgtactgctcggcgtcgatgctttcgtcgtccgtggggtaaaaatagtcgtcaaaatgaatgccgtccacgtcgtatttttcggcgatctccgctgcgccgtccgcaatacggttgcggatatacgcgcttgcggggttataataaatgccgctattgtacgccataaaatattccgggtgatttacataattttgcatataaaatccattttcgtcaagctccggcgggattgtcgtgctcgcaatgcgcagcgggttgatccacgcgtgaaactgcatattctgctcgtgcgcggcgcttaccatgtattccattgggtcatagccggggtctttcccctgcatgcccgttaaaaggtgcgaccacgactcgtactccgagggatacaggctgtccgcaaacggccgcacatgcacaaacaccgcatttgcgccgacgcttttcgcagctgcaagcttggcatcaaaattctccttgaacgcttcttcggtcttctccgtcacatcgagcgccatgtacggaatccacacgccgacaagcggttcttctgcttttgcggtcgtttctgcggcgttgctatcctcctgctccggcgcagtgcttgagaatacaacttcaacggagttttccgccgcactcggctctgcgtttttctcccgtcccgccgcgcttttcatcgccagaaatacggccgcaaccaaaattaaaaccgcgatgacataatgatactttttaattacgatcatacgctttttcctttctctctgcgtttccttgaccgccaaacggatttgcggtaagataatcataagtatgagacaagcgaggaaaatatgatggattttaaaccggaacccgtgcagttcacactgctgacctattattgtatcatcaatatcacagccgcagccctgaccgttaccgataagcgccgcgcacagaaaaagcagtggcgtgtcccggagcgcacgctccttttgctcggtgcggcaggcggcgcactcggcgaatttatcgccatgctgtgtatccgccacaaaacaaaacacctgaaatttatgatctccatgcccgttttcatcgtactgcacaccgtccttttctatcggatttttttgctttgagggggactttaatgaacacaaaatataaaaatctgctgtttgatgccgatcagacgctcatcgattttgaaaaggacatgccgctcgcgtttcaatatatgtacgagcaatcggggcttgcaaagcaaaagccatacagcgcagagattctgcgcctttataacgactgcaacgaaagctggtggcggcgttttgagcaaaagctctgcaccaaagcggagctgtaccgcaaccgtttcgtcgatttcttcgaggtcgcggggctcacaccggtcagcatcgattttttgcaagacctgtatgtctccggcatagcgaaaaccggcacgccgctgccgggcgctttagatatgctacgtgcgctttcagagcgttacgacctctacatcaccacaaacggaaatccgatctcgcagcccggtcgcctcaagaattccggcgtcacggcctttatgaagggctgctttatttccgatgagatcggcgcggcaaagccggataaaaaatattttgattatgtccttgcgcgcataccgggcgcgagcaccgaaaactgtctcgtcatcggcgattcgctttcggcagacatcaaaggcgcgcagaacgccggtttagacagcttatggtataaccctaatcgcaaagcaaacacccttcccataccgcccacctttgaagccgcaagctacgaagatatcgtaagaattttgctgtaaggagcttttatggagaaccccgacatcgaccgcccggccgtgcacatcggcttcccctttttcgcggcgctgtttgtcgcctctttcttcggcgcgccgtttgccgccgtttcggcagttttgctgttcgccgccgtttttctgctttttctgtttaagcagcatcgacaacggccgaatttcgtgctttccctcatcgctaccgcagccgcattcgcggtgtttgcagctgcaatgaatctattcgtgctgcccacggagcgctatgacggcggcacatataccgttaccggaaacgtagagtcgttcctcacgaaaagcaacgggcggttctattacaagctgcatgtgacgcacatcgacaagcccgtacaggatgtcgatttttcggtacgcctctcccacagcgaggctttcccggcagagattggcgacacggtcacgtgcgaagcgaagttcttcgcgtttgaagacagcctcgggctctccccgcgcacctcgtggcttgcggataacatggtcttatccgcctatgtcacggattacgaatccgtgcaggtcacgcctgccgaaaagcgcccgttttcatattatgtaaaccaaatccgcacgcattttcacaatttgcttttggaaaactaccccaaagccgaaggctctgtgctttctgccatgctgctcggcctgcgggacgatatggaaaccgagcttgtctccgcttacaaaaaggccggtgcttcgcacattctggccatctccggcatgcacatggcgatcttaacgcagttcaccctcggttttctgggtctgctcggtctgaagcgccgcccagccgcgctcgtttccgcggtgtttacgctgctttttatgttcgtctcggggctttcggcctctgtggtgcgcagcggcatcatgcagctcattttgcttttcggcattcttctcggtcgccaggcggaaccgctcaactcccttgcggtcgccgttttgaccatgagcttattaaacccgttctgcgcgggcgatgtctccctgttgttctcgttttcggcgacgctcggcatcatcctgcttgcgccccgcatcacaaaagcagtcacgaaaaatattcgcaagccgcagcggaaagcgcaccttgcaaagcttgtttctgcattttccgtctcgctttcggcggtgcttttcactgcgccgctgcagctttatttatacggcacggtgcaattcgtttcggtgctcacatcgcttttgatgttggagatttccgcgtggctgctgcggttcgggctcatcgccgccttgctgctcgccgtccccgttctctccccgtgcgccgcgccgttcgtgtttttaagcggcatttgcgtgaaagcgcagaatttcatcatcacgcttatcgcagagcacattcccggtacgctgcgtatctccggcaaatatctgcccgtaaccgtcgtgatctgcgtccttttcttcacgctttccatgcttctctaccgccgcaaaaataaagcgctgccatgcgttttagcggtgtgcatcctgctttgcggcatgggtgcaaacgcgcttttgaaccaaagtgccgcacgccttgtcgttttccgcaccgattacgccgcctgcacggcgattatcacaaacacctccgccgcggtgctcgggtgcaacggaaatgccgcttccgttgagaccgccctgcgcgcgaacggtgcggagcagatcacccttttacacgtgcagcctgatgaaaaaagcatccgctgcgccgaaaagcttgcacagcttttcgaggtcaagcagattctcgtaccggacaccgtatattaccctgcggaaaacgctgctttttacgatttcagttatgtcggcgtgcttccctccggcagcttcacggtcacggacggcggcgagaccgtcacggtcaccgtaaacggcacggaaatttaccttgaaacgaaacgcagcacgtcgctttcccacgacacagatattttggtgacagaaaagccgcaaagtgcggtctctgccccgtttacgattttaaaaataaatggtataatagagggtaccgaagcttcgctttcgcccggcgcatacctctttatgacggaacacgaaagcatccggctcgattttgacgagcgcggcacgtacacggtatacggcggctaagccgcaacgaaaggaaaacactatgcccgagatcacggaaaccaaactcaaggagcagattgcaaaagagcaaatcggtagcctttactttttgtacggcgacgaaaagctgctcgtgcgccgcaatttaaatcgcctgttaaaaaaactggacggcaacttcccggaattcaactttcaggaattcccgcacgacgcgcccgtagacagcattgcggacgccgttgtcgccatgccgtttatggtagagcgcaagtgcgtcacggtctccgacctcaatgtggaagccatgaacactgcggagctcgataagctctacgaattactcgatactattcccgaaacgaccgtgcttattctttatctgcccacgcttgagatcgacccgaaaaagagcgccaagtggcgcacgtttttaaagaagctcgacacgcgcggcttttccctgccctcgctgcgcctgaaagacaacgagctcgaaaaatacgtctgccgcgaggccgaaaaggcaaactgcctactctcccgcaagcttgccgagcgcatcgtgcagtacgtcggcaacgacttaaacgccctcacaaacgaagtgacaaagctctgcgcctttgcgggcgtcggcgagatcaccgccgagcaggtggaaaaaacggtcacgaaaaatatggaaacaaccgtgtttctcttgagcaatgccctcgtgcgcggcgattacagcaaagcgtatgcgctgcttgatctactgatggcccagcgcgaagaaccgtacacgattctggccgttttaagcagcgcttatatcgacatgtaccgcgtgcgcgccgcgattgaatccggtaaaacgtccatggcgccgacggaatacggcgattaccgcggccgcgattttagattaaaatatgccgagcgcgacgtgcgcgacctttccatcgaaatgctgcgtgaatgcctttcgcttttgctcaactgcgatctttccatcaagctttctggcggcgaaaatatggacagaatcgcactcgaaaagctttttgcccagcttttgtacgtcgcgcaccgcggcagcgtggcctaaaggagctcttatgatccacatgaacgaagccctcatcgtcgagggccggtatgacaaaagcaaactttccgcgctgaccgacgctatcatcgtcacaacgaacggctttggcatctacaaggatgctgaaaagcgcgatttcatccgcaagctcgccaaagagcgcggcatcgtcattttgacggacagtgacaacgccggtcggcagatccgcgcgtatatcacgtctttcgtgccgtcaaatcaaattcgccacgcgtatatcccggatatttacggcaaagaaaagcgcaaagcggcgccttccaaagagggcaagctcggcgtggagggcatttcctcggaaattttactggaaattttaaaagaagccggcgcttccgttgagggcagcacaaccgattttcagcccctgaccccggcagacctcatgtctctcggtctcaccggcggcgtaaacagcgccacactgcgccaaggcgttttgaaagcacttgatctccccgaaaacctcacgaccaaaatgctcctgcgctgggtgacgagcgaagaaaaaaaggcgcagcttttagccgccgtagaaaaaatcaaaaacggtgcttgacaaaccgaaaagcgccgactataataagcacaatggctgtgaaagaaagaagtacgcgttttcatcggcacagagagcctgcgggtggtgtaagcaggtgcgaaaaaacgccgaaatacattccggagctgtctttttgaacgggttcccagtaaaaaagtccgtgtgcgcacgttacagcgcaagggtatgtttgtacccgttgaggtttcaggtgtgagcctgaaataaactgaggtggtaccgcgaaccacaaaacgaaacgtgttcgccctcatagatcaagtgagggtgtttttttatattcaaaattcccctccttgaagatcaagggggcttttttattgccccaaaagcccaaaacctgaaaatcgaaaggaacgaaacaacatgggtatttacgaagaattgcaggcccgcggcctcattgcacaggtcacggacgaagagcgcatccgcaaccttatcaacaacggcgaagccacgttctacatcggctttgactgcaccgcagacagccttacggccggtcacttcatggcgctgaccttaatgaagcgcctgcagatggcgggcaacaagccgattgccctcatcggcggcggcaccacgatgatcggcgacccgagcggccgcaccgacatgcgcaagatgctcacgatggaagacatcgagcacaacgccgcctgcttcaagcgccagatggaaaacttcatcgatttctccgatggcaaggctctcatggtcaacaatgccgattggctcttaaagctcaattacgtcgagctcctgcgtgaagtgggcgcatgcttctctgtcaacaacatgctgcgcgccgagtgctataagcagcgcatggaaaagggtctctccttccttgagttcaactacatgatcatgcaaagctacgacttctacgccttgttccagaagtacggctgcaatttacagtttggcggcgacgaccagtggagcaacatgctcggcggcacggagctcatccgcagaaagctcggcaaagacgccgcagccatgaccatcaccctgctcaccgattctcagggcaagaagatgggcaaaaccgccggcaacgccgtgtggcttgacccgaacaaaacttccccgttcgatttctaccagtactggagaaacgtagacgacagcgacgttttgaagtgcatcaagatgctgacgttcctgccgcttgacgagattgaaaagatggaaagctgggaaggcagccagctgaaccgcgcaaaggagatcctcgcgttcgagctcacccagatggtacatggcgccgaggaagcccggaaggcacaggaagccgcacgcgcactgttcggcagcggcgcaaactccgagaacatgccgaccaccgagatcaccgcagccgacctcaccgacggcgcaatcaacattctcgacctcatgcagaaagccggcctcatcgcatctaagggtgagggccgccgcctcgtgcagcagggcggcgtttccgtcgacgacgtaaaggtcaccgacatcgccaagacctgcaccgcagccgactttgaaaaaggccatgtcatcatcaaaaaaggcaaaaaagtcttccataaggtcgttttgaagtaagtaaaaaagtatagcaaaaggcatacgctccgttttcaggaacatatgcctttttttgttatgcgctatctaattaccctgaaaaatccagcctctcttgttttgtatttattctcttattttattgtatacttccatatcacataatcatccaatgtttcaatattatccacttgaacatttgggctaccatgctcttggaaatacgttaaaatacgcgtttcagacgacgtattgctgacgtaatagacgtttttgcttggcagagctgcaagcgtattttcaaagccgagggactcaatgtagtcctgcacacttgggtggctttgcgtcacaccactcaaaaacaatacatttttcggaaagcaggctcggctgcttttaaacacactaaaatcatagtacagcgtctgaattgccgtgccaaaatctaaaacatataaattttccggcgtttcgttcacttgtgctaagaattcggggcgcagtttgccgggaattacagctttcgtgtatttttccggagaatagcttgccgaataataaaatgtaccgtctacatacatgcgatatgctatagcgtcttctataggtgcagtattgtccggcagatagtttatcccctgccatccgcctaccaggagcgcggcggcacacaacagagcttccgtcgccttgctgcgcttaaaaaacggctcacagaaatacgcaatcaatacggcggcgcagaacagaaaaccaaattctacgcgatagacccaccgtccaagtctgtaaaaatagaccagaaatccaagcaccatcagtgccaacaccgccggtacccaaaattttttgggatttgtaatggcgcagaataatccgagcagcacacagcaaagcgtcatcggataatagagttggcgcaaccgaatcatgctgagcgcttcgcgaatactcggatgcagattcacacgatgtgcattgataatatccaatacttgctgcatcttctctgtactaaacaccgcttgatctgcaaaatcccaatgcagaatcatttgataatcgttttccgatacgccgattgctgtaagttcgtcgcgcagatcttcataatcacaccaggtgtaatctaatatctgggagcggattttcgtaaatgtatagtattctgtataatctggattggctgtatatgtaagtgcatttacaatattaaacaaaaagatagtaactataaaaactatccctggtacagcaattttaagaaaaaactcatataacttcatctgtttttgcttaaaacaaatcactatatgataaacaacaagtacactagaaaacgctatcgccataaagaaagcgtctctacgaaccaaacatcccgttatagccaacaaaactcctaatacacagcatttcctcctgttttgttcaaacagcgcccaaacaaacaacagacatccacacatagatgccacaatcgctgtttttgtaaactgtggcaagatatacagatcacgtgcggcaaaggctgtaatccagacaacagtcagaaccgctgtgccaagacgaagtttctgcacaagtacataagtgagcgcaagaaaagacaaaaagcaaagaagcatttgcagccaaaaataccagcttattgtcgggaaaagactgtacagcggcacaagaagccagccaatgaaaatattggagaacatcatgtgggcatccgggtgaccagtatacgcaccggaaaccaccatttccatgatgaaatcatccgaaacctcatatttaatgctacaaaaaaacagaatgcacaacaacagaaccacctgcgctgccgctaagacaaaaaacaatttctttttgccgaagcgctcctgcaaattgattgccgaggcgcttcgcatctgttgtacagtgcttgtcatcagcgattaccgtacattttttcgtagtaattctgatactcgccgctaatgatggtctgccaccactcgcggttatcgaggtaccactggatggtcttcttaatgccgtcctcgaacttggtctccggcaaccagcccagctcattgtggatcttggtcgggtcgatagcatagcgcatatcgtggcccttgcgatcgccaacatgcgtgataaggctctccggcttgccgagctccttgcagatgatctttacgatctcgatgttctgcttttcattgtggccgccgacgttgtatacctcgccaacacgacccttatggataatgaggtcaatcgccttgcagtgatcctctacatacagccagtcgcggacattgagaccttcgccgtaaacaggaaggggcttgtctgccagagcattcgcgatcatcagcgggatcagcttctccgggaaatgataaggaccgtagttgttggagcagcgggaaatggtcacaggcagaccgtaggtacggtgataagccaaaaccagcagatctgcaccggctttggagctgctgtacggagagctggtgtggatcggtgtctcctcggtgaagaacaagtcgggacggtccaacggcaggtcgccgtaaacctcgtcggtagagacctgatggtagcgctggataccgtacttgcggcaagcgtccatcagcacactggtgccgataatatttgtctggaggaagataccaggatcttcgatggaacggtcaacatggctttctgcggcaaagttgaccacaatatccggatgctcttcctcgaacagtttattgactgcttcgcggtcgcagatatcggccttcacaaagcggaaattcgggttatccataacaggcgccagcgtagacaggttgcccgcgtaggtcaacttatcgagacagataatgcggtaatccgggtattctctcagcatgtgaaaaataaaattggaaccaataaatccggcgccgccggtaacgatgatcgtcataatctaactccttttgctgtggaacttactcctgggtcttcgtactgcgaacggaacttctgatcgtaccttctgcaactattttcaagtgcgcgccatacggggatttaccgtacttttccgcagaatgcagcagttcttctttatcgatccagccgaagcggtaagcaatctcctccggtgcggagatctttacgccctgacgtttttcgaccatacgcacaaaatccgccgcgtccacaaggctgtccatcgtaccggtatccagccaggcaaagccgcggccgagcagttcgacatccagattgccttccagaagatacatttcgttcagcgttgtaatctccagttcgccgcgtgcggaaggcttaacctcagcggcttttttggaaacgcccgctgggtagaaatacaggcccgtgatcgcataattgctctttggatgctttggcttctcttccacagagatcaccttgcctgcatcatcaaattccacgataccgaagcgttctggatccgttacataatatccgaaaaccgtcgcacgtcctttttctgcattggaagtagcagattgcaaaatgtgagaaaatccattaccgtagaaaatattatctcctaaaatcattgcacaactgtcattttcaataaatttctcaccaatcaacaaagcttgcgctaacccatctggagatttttgaattgcataactcaattgaataccaaattggcttccatctccaagtaaatgttcaaatctcggagtgtcttctgatgtagaaataatcaagacatctcgaattcctgctaacataagtgttgataagggataataaatcataggtttatcataaataggcaataactgtttagacgtcaccagtgttaatggataaagccttgtcccagcgccacctgcaagtataattcctttcacaattcttatcctcctcactatataatcttagatttactcttgaatactcccgttttcacaagatttcataaagtgcatacagagcaaatgcgggcaagaaccacatcaagtgcaagttccggcgaaaaatgtgtaaggcaaagccagcgtccagtggtttttggatgacaggctttcgataaaccacattttttgcagcagcaagcctcacatttctatcagggtcataaccctacattccttcgtcctgcttgcctgcaaagtggtgcggtttttccttgtataccgagtctacgctctgatggagggaatcaatgaccaactaccggctctgtatttttctatggaatcatgttaagcggaagtttgacgagtcttcctgcgacgcaacagggagacgcttcctgtaatggggttatgccgcttttaacggctggtttctttggatatctgccaagcatcttttcaggactgtatgcacaagtcttttatggcaagcgcatagaacactcgaagcaatttacagcatatcgcaattatcgactggattttttgcaatggattattttgctgtgtggtgtaataacggtgaagaagctgaaattctcggttttttgcaagtagaggtattactgcccgaaacaggattgctctaagtctcgatcttcgtctcgatcttcctcgccggctgatctctgtcggtcctttgtgcttaccggaactgttttcagtaatggaaaggccagccagtttttggatttggcgaggagattcaaagcgtctgatatcgccaatttcggcaaaaagtccagcaactgtcaccagaccaaggccttgtatcttaagcaattcagccaccgctgaaattcgactgcttagattctccacaacctgcatgacacgctcatattgctgaagtttagcgtcataatcctccaacaaaatctgcagtttcatacgggctgcttccatacctgtggtacaccctacgctggtttgggcagcttcataaatgcgctgtgccctctttcgacctattccgcaaagtttcatctgcttccaaatcccactgattccttctacaccaagagaaattaaatcacttggaaacggagcggaatgaagaagcgccatgttaccggtgccggtgaaacgcccaaacactttactgtgctccggaaaatagattttcaaccagcgctgaatttgattttggagtgaagcaagctctttgcgaatcctccagcggcaattcatcgcaatccgtaattctgcgtatagtccttgtggaatgtacggatatacatagcgtccttccaacaccacgctattgtttttgaatctttcttgtcacttttgctgggatggccatcatccaattctttgctacgtttcacatgatatggattgatcagcaccagttaaaaatcactcccttgcagatgggtttccagcgtaaaccagcagtatcctgtgggctcaagccctaccatgacgctgtccttcttctgttcgaccgtcaactccgatccccagcgcagaaagaagttaaaaccttctgcactgttctcaaatttgactgtcttacccagttcaaggccgcgccggtcgaatgctcttgcccaatggagctcactggcaatatccacaccgattaccattgttgtgtctgtgacttgacggattttctcattctgtgttacactcatttcggatacttcctttcaatctcaaacgtacgtttttattagggctttgaccctgcttgtgtactttgattgtaaggaggtatctctttttgtgcaaaccctggattttggctctttacaggaatcttatataataagtttcatagataataatttcaggtatcagaaggcttagagatgcccgtgatacaatagctgtaggacagcaaggtcaagttcttacacctctggttaagccgaaaggctgcttcataaaaagtccatccccctaagtcggaaatgttgtgaccaaacgtttttgtaacacttgtagctaaaaaagatcaggtaaatacctctttcctttatgagattgattatatcttattagcccctgccgttacaactataatttatcataacaacttcataccattagacttttacacggtttcacaaaagattcattaacgcacgttcaagttccaaaatatcatttacaattaaactgtctttgtattctttacagtcatcaagattaccttgtccccatgtaacaaatacgcatggaattcccgcatgcttagcagtgagaatatcgctgtatccatcaccgacatatattacagaatccaattttcgcccacactggctacaaatcattttaaccccatacggatctggctttgacgggcgacattcatcataagctacaatagaatcaaataaatctttcgggaaatttttattgattacatcttctgttagcacttgagccttatttgaattcaccgccaataaaatgttatgtaatttaagctttcgcagtaaatttaccattccgtcaaacggtacagtattaggtttgctatcttcagcataaatatgtctataagcacattttactctattgatattatcactactattagactcagaaggtaataatttagaaaccaccgtttctaaatcacctccaacaaattctctatactcttctattggatgttgaggaaaaccacaagtagcaagggccatgttaaaacatcttgcaacatcgataattgtatctacaagtgtaccatcacaatcaaatatgattaaatctctcatgacattctcacatattgactcctgcaatctctaatctctctgccatcatcttcaatcttgcttgatcttcaactgccatacgattataaaactcacacttattctgaagatataaggtttcgaattccatagcctttaaaattccagctttaagtttctcttcatcatttgacgcatgaaataccacttttcgtgtttcaaagcgatcgttaagcggatacaatttctgaataaacggaacggcatcaaaagaaataccaccaccaaaattaacttggaagccccgtactttacaacgttcagcaatatctttagtagcctcaaagacctgatcgccattaatttccgctcggcttaaacccatagatgcagataaatccactctgccaatcgaaacagtagacaagaatccctctgcttcatccaaaattgtatctaagttcttgtggcaagaggttgtttctgcgttaattatccattcgatgtcatctacagcatcaccgtaaactttatttgcagctccgacaaatttcttcattgcaaaaggagactcaatcatcggcgccataatgccagaagctcccaacatacgacactgatccaaatcacgtactgcttcacagccaccaattttaacgtacagtttcatatctgcgcgaaaaataatttcattcagcatcacaagctcatcggttctacttccttctgcttcaaactcagccttaatagcaataacgtcatactcatcttttaaacacttcaagatgtcgagcatctttctttcggttttattcataaatagaccctccaaacataatttatattattttcatactattttcatatattgttcttccgtatgctgataagctctattttcgatatttatggtttctcttactgcatattgcggcgaattattaatgcagatataaattctaccaatatattcaccaagcagtcccaaaaaaagcataataattccagcaagaatccatatcacagccattatagaactgtaaccagccataatttcaggatgtatcagtttgcgtatgattacaaatgcaccccaaaatacaccaagaataaaggaaattacgccaaataacgaagctaatctcaatggtttttcagaaaaagcagtaaaaccgttcatccacagcccaattaacttgttcaaattatatcctgaagttcctatctctcgttcttgatgatctatttcaacatttgcaatatttcgagttattctgagcatcaagccgtgtacaaaaggatacgcatttttatacttaacaatttcatcagctataaaccgacgaaatacacaataactatttaaatcaatatctttaggtttaccaattaaatatgtagacatcgccatgcttagcttacttcccattcttctaaaccatgaatgctttttactggtatacttagcagacacaagatcataaccctcgtcaagcttatcaattaatctaaacatctcttcggggggattttgtccatcatcatccatacagacaacaatatcacctgtaacataattgtatcccgccataagcgcagcatgctgtccaaaatttttagttaaggaaacaactttaacgtttgcatttgacgtagcaagtgctcttagtacttccaatgtattatccggggaataatcatttacgcaaataatttcataattatatcggccatcttgctctacggttttttcaatacgctcaattacatttccaatagatgcagcagaacgataacatggaattacaaacgaaagtttcatatatttcacaccctctcatatttttaaattccatttgccaaatcaaaaatcgcttcatcaattgtaacttctggctcaaagtttgtatctcgcttcagcttctcaatagagacatcccagcacagaccttccatagggtccgtatttccatcgtatacaatctgagatgttgaatgaagcaaagaaatgcacttttttgccaaatcaaggttggaaatcagattatagctagcaagattatatacaccttgagcttggctgacaatgcaacggtaaatggcctgtgcaatatcctttacatgaatataagtctgttttctggttccctgtccataaattgtgatatcctctccagataatgccttgttaacaaatactggaaaaattgtcttgggattaacaccacatcctaccggggaacaaattctgagacttactgttctgagaccaaaggtatagctggcatagtcagccagaagctcctgtgtatgctttgttacgtgatagactgtaggcggcttcaacggatgctcctccgtaatcggatgctgaattggacttccaatcacaggaagactagatagttgaataaataccggaatttttttctcctcacagagttccaaaagccgctgggttcccacacagttcgaagcaaccacttcgaccgcataaggctcatgacgcatatctgctgctagatgcaccactgcgtccagcgaatccactttcaagttgtccataatatgtcccacatgatctgtaaaaagatcgcaacacacatattcatcacactctgctaaggactttgtgcgacgaccaagaccgattacatggcaacctttttgcttgagctctgcacatacatggcctccaataaacccgttggaccctgttactaaaacattcattgctccgattcctcatcatcaaattctactgtcacaagttcattcatatgtcgtaccgcgttgatcatctcgtcttgattctcataaacataatacagataggcaactcgttcattcatataatctcgaatcgcctcacccggttgaatcacttcaatccgcttgaacaggtgtttttctacctccggcgccacatgataaccctttacgatgccatttctggttgccataaccccatggtgtcctgcataatcactcaaaggctttgtgctttgtaactggtccagcggcataccagtttctgcgcgaaccagcgcctcttcccacggaaagccagttatagcacccgcaacagtcagaaactgatttccgaggcatcgccgcatcatttcaatgatgttcggcttttcatcttgaataatatactgaagtgtaaacataccatctactaacttcaactctgcacaaattctttcaatgattccatgaagctcatcctgatacttttcaattcctttagccggaagcgtctcggactgaattaaatatgggttaataggacagtaggtatcattgctaactgaagcgacaaccttcccaccaatcacaaatgtgtcaatagattgctgcacacccgttataaagggctcaattacaatactcttctttcgtgagcgctcaaaagcattttcaatggcctgttgggcttcttcaacattatccgcccgatggataccttttcctccagttaaatctgtagcctttacaataataggatacgaagtatgccttgtaaactccagcgccgcggccacatcatcaaaggctattgatttcggattacgaatccccagcttctgaatgaacaacttgaacaagtctttttggtgaagaagcgttgcgttttcataagtgtcatgccccggccaacccattttttccgccacgtaagcagcagtaataacaccaaaatcattggcacaggagacaattcgctcaattccgttttcctttaccagctgcaaaaccgcttctttgtcagaataatctgccggaatatactcatctgcatatttgtgcccaattaactgcggattgttaccgcttgtaatcacataatatcctagcttcttagctgcttgaatcaatgtgatttcactaaagcttccatttaatatcagtaatttcttcatttttctgcccatcctttctcaatggcagttagtttcggttttcgccaatataagatacacgcaacgaaacatttcttgtgtccgcttctccaagttcttttgcccgattaacataatacgggcaaaccaattccacgatatactgttcactttctgtaatgggtatttcttctggcgggataataatcgtatgatatcctggctgtagcggttccgttgctaccagtttaccattcacgtaaatctccagaccttgtgcttgatcgatattttgcacgaaattagggtattccggaacatacagctccgcctctaatcctttctggtcaatatcataattgagaagagaaacacaactgtactgctgtgtccacgcatagccttcttcccaatcataaaagccaatcaccgccgcacgattgttgtaactattcgcatccaaatccaaattggaaataagtgtttcttcaaccactgtgtttctttgtaagtttgtgtttccagatgtcgcataccaccgcccatcatgcaaaaacacaaactgtgcccgataaatttcaccttgaacaattgtattgctgtgtaaaataacacaattttgctcagacgtcaaagcaaaggtgtattctacaccgctttcatttgttaaaaccaaatatccctcatccgtatcaggttgaaataatgttatagatgaagtatctacctcaatcgtatccatatcactgagttctgaaccgtttaaaaacatgagcccaggttctcccaatattgtctccgcttgatccgatggcttacctgaaatatagcggcccgaaaccgcttcatctagcacttcatctacagagaatgtaacattattataatagtgctcgcgtaggtaatccaaaagctcactggtgcgagatgcgcattcatcccttcggacagcaattcgaacattgccatgcactaggtcacggatcggatttgtaattccatagtttttcagattttgcttcattggagcaagatgaccgacatattgtccaagcgagccccagttttctgccgaacctacattgataaaacgaagggtatctaccgcataaatcggatattgctgtagccagttatttgcccatagagaaaaatatatattcgcctttcgacttgaaaaatagtctccactccatctcgcataggttgcatattgtattttttcgcctgtcaccttactcttcaaatacacaccaatggaattatcattgtgcattctcgcattatactttgcgtaaatcgaatccatattttcaaatggagctacaaacagaatcaatgctgcaacaatcgaatacatgcatgttttctttatacggcccatttgggttacaggcagcctcagtttctctccttgcagtaagatgatgagtgccgtaataaagcagatccaaatcggccactccgtacgccaaatcaagcggccaatctgctcaaagtaaacataaaacgcaacggccgcagtaaacatgcccccaagtgttacagcaattttccactcaaagaaaattcctactattcctcctactaaaagtgcaatccacaggtaatcattgcttaacattgcgttgcgtaccgtcataacagcagacaaatcagactccgtactttcgctcgtattgctttttatctcatgaaggttcttatacagatcttgcgtaaagaaatcaggatcttgattgttccatgaacacagcaacaggaaatctgtataactgacgccaagcccctgatacgccgcttcattggcaaagtagtccggatgttcataatcgtcaactaatgttctgctgttattccaatcataaaatcctgggttcgttctactcatcaaaatatgctgtgccacttccacaccaaagcacaaaagcagcgcagtcgcaaacggaatcaaacggcgaaaaaactcttgaatcttttcatgatgacctttcggcatttttcttattgtgtcaatcagctttttaagccatacaattccaaagaatgcaacagaataaactatgcagtctactcgcattgctgccccgaatatgatccaaatggtagaaaagatgtaccatcgcttcttttttcgtcgctcaattgcatacatcataaatagacatcccgatgcaattgtcacggctgctgttgtggtaaattggaactcaaagctgataagcggagccattataattccatacagtgcagtaacaaagctggcgcgctttatctccagacattcgaatagaatccagccaaccattaggtaagaaacataatttgcaaacagcagaatccaatgaagccagaatagtcgcagtccagtcagagatagtagataaatcatcccggtcaataggaaattagccccaagaacaagcaaacttctgttattttcaccaaacgctccgtctgcacatgcttcgatataccaatcatccagataaatctcgttttggctaagtaaaattgccacgattgaaattatagtacaaattccaaaccaaagcattatcttgcgtctgtttagcgaaacactaatagttatatcagctctccttttatgattcataaacgcctcttcgcaatcctctttaaaccaatcttcacaaacatctatatacgttcttctttttcgttttaacatagttaaattatgtgccaataaaaaagagcaaaatccccacaagcattatcacaagtccaattagcttttttcgagtgattttttctttcagaatcagccaacttaaaaacgcaaccacaacttgaccaaaggcatcacaagccggagccattgataacggtagcacgcgatacgcaatcacagtgcaaagtgttgaagccaccataatcccataacccaaaatcactctgatgtttaaatactggtaaatccagttcttatatgtcctttgtgccgctgatttcagtagtaattgcgaaacccctgcaattactacaccaaacaccataatcagagcatgaatcagcaaatcattcatcggcagtcaccacaagacagacacctacaatgataattgcggctcccaaaatcatcgtccaagtaattctctcatgaaacagtaatgcgccaaacagcatagtccatacagttgatacgcttctatttgcatacgccgtattcaatggcataatcttcaaaaattgttgccacagtattgcatatatcagcattagtaaaataactgcaccataaaacaaaacaaaccgtacggacaaaaaaggagtgccggatgccatttttgtaaagatacccgttgttgaatatagaaatatagccaaatggaggccaacaattcccaacaatcgcttttttctgccttcaaaatttctttgattgataatcttatcgttcataaaatgtctttacacagttgcacactgtctcgatatctttctcttccaaaccatagtacatgggcagacgagtcaaccggttgctctccttggtggtataaacgtcttcgcccgcaaagcggccaaacttcagtccagcctcggcggaatgcagggggacataatggaacatggagtaaatatcatgcttcttcagataggcgatcatggccgtacgttcctctagatcacgaagcttgatccagaacatatgtgcattatggctgcacccttcggggatatgggcaattttcagctttccctcctgctccagcggcgcaagacgctcctgatagtggtgccaactggcaagccgagcgttgttgatcttctcggcctcttccagctgtgccagcaggtaggccgcattcatgtcagagggcaaatatgaagaaccatagcccacccaagtatacttatcaacctgtccccgcaagaaccggctccggttggtgcctttttcccggaggatctccgcagcctcattgttctcttcatcgcggatcagcagtgcaccgccctcgcccatagagtagttcttggtctcatggaagctgaagcagccaaaatcgccgatggtgcccaatgctttgccatggtaggtactcatgacgccctgcgccgcatcctctaccaccttcagattgtgctttctggcgatttccatgatggtatccatctcacaggccacgcccgcatagtggaccggaacgatcacacgggtcttatcggtaatggctgcctcgatcttggtctcgtcaatgttcatggtatccggacgaatatccacaaatacaagctttgcaccagccagcacaaaggcattggccgtagacgagaaagtaaagctgggcaggattacctcatccccgggcttcagattacaaagaagagcagccatctccagtgcgtggctgccagaggtggtcaggagcaccttctggctttccgtcatctgctccagcaattggtggcatttctttgtaaactgtccatcgccacaaattttgtgtgctttaatggattcagaaatatactccatttctttaccagtataaggtggtttattaaaaggaatcatgcttctttcaactccgaatttatttttattgcattatatcatataattcgacatattgcaaccgatataagtatttttaatgcctttctctgcgttgtaaatagatatgacccatagaaggtaaagaaaagaggggtagaaaagaatcaggcgttagaaagtatttcacggaggagatcaagagggcttttgccgcccagcgtgcgcatgggctttctgttgctccagtgcaaatgatctttgagctttcggtttaggtcttttacacttgcaaacttttcccagttgtaaaaatagcgctggtcgtttcgatgactccgctctaccttgccgttgtgccaaggcgttctgggcggaatcagtttgtgctgcccgccggcgttcttcaaagcgatgtcaaacggacagagtggaacgtatgccttttttgtttacaccgtcacatacggcaacagcttctcaagcagcttttcgccgatgccttttacattcgtgagctcgcgcacatctttgtatccaccgtttgcttcgcggtattcgatgattctatcggcgagtacttctccgatgccgttcaggccaatcaactcttccttcgacgcggtgttgatgttgactttttcttcgcttaaagcggatgcagccggcgcgctcgatgctgcttcgctttgccctgtcgatgtcactctgtatggttcaagcggtgtattctcaaaggaaacgcagaacaacaccgccgcacatgccattaaaaacagcgcgaacagtaaaattgtccgttgacttcctgcgcgcacaagcgctcccccttactcgtcctccgcgtgcagcgtcttcacaaaatccgtaaaatatggcggcagcggcgcttcaaactccatatattcacccgtgcgcgggtggatgaacccgatgagccccgcgtgcaggcactgtccatgcagctgcgtgatgacttttttcggtccgtagaccggatcgcccgcgacaggatgcccgatatacgccatgtgcacacggatctggtgcgtgcgtccggtctcaaggcgcaggcgcagctgcgtaaatcccgtaaaattttttgtgacaaaatagtgcgtcacggcgtttctcgcgttcggcgtgttttgtaccgccatgcgctttctatcctgcggatgacgtgcgatgggcgcatccaccgtgccgtcctcgcgaattttcccgtacaccacggcgcggtattcgcgcgtaaagctgtgcgccttgatctgctccgccaagtgccggtgtgcggtgtcgttcttcgcgacgataagcagcccgcttgtgtccttgtcaatacggtgcacaatgcccgggcgaatcacgccgttgatgcccgaaagcgaatcgccgcagtggtacagcagcgcgttcacaagtgtgccgtcataattgcccgctgccgggtgcaccaccatgcccttcggcttgttcaccacaagtaggtcgtcatcttcatatacgatgtcaagcggaatgttctccgccttcacgtcgagcgagcgcgcttcgggaatctccacgcacagaacgctccccggcgcaagcttcgtgcttttctgcacaatcttattatcacaggtcacatgcccgtcgcggatcaaattctgcaccgcagagcgggaaagctccggcagcgcctccgcaatcagtttatcggcgcgccagcccgccgctgtgacctcaatctcatgcagctccgccatacttattttccgaccccgtcggcagtcgtttccgtcgactcgttcacttttttatctgccgcttcttttttgtctttaaagaataagtaccacacggcaaacaaaatcgcaccgaccaccacgcagcagtctgcaaagttgaacacatacggaaaaaacagcacatggatgtaatcgaccacatagccgaaaataaaacggtcaatgaggttaccaatgccgcccgcgatgatgagcacgcacgacgtgcgcgacatccatgtgtggtgcttatagcggaacaaaagcacaagcaacgctgccataagccctatcgtcagtatgatcaaaagccacgaaagcccggcaaaaaagccgaatgccgcgccgttgttttcaaggtaacggaactccaaaaggcccggaatgcacgtcacgctgccgatgggctttaagtttgtgataaccgtcatttttataaactgatcgacagctgtcagcacggcgatcagcaaaagaatgagaatggacaaaagaaatatccccttataacccgaaaaaggcgcaagccgggcaaaaccggtttgcaccttggttcggttcaattattcaacagcacggcgttattaagcacgtaccgtttaaaacaaattcaatgtgtccgaaattattcggaaagtgcttttgcgcagcgctcgcacagatccacgtatgccggatttttgccaaccgtggaggaatatgtccagcagcgcatgcacttgcagccttctgccttatcgacctgcacggagaggccaagtgcatcgtcggaaagtgtgccgccctcgccgtccacgatctcgacctgagatacgatgaacacggttgcaagctcgtcttccacagacttgaggaacgcatacagctcgccggtgcagaacagcatgacctttgcatcgagcgatgcaccgatcgtcttctctgcacgtgcgttttcaagcgccttcttcacaacatcgcggattgcatggattctatcccaacgtgcgatgaattcttccgtcacgtcaatgccgtacttttcgctcgtcggcttcggcatctcgttgtaaacaacgtggcgtgcatcgcaatcggaagcgtgcggcatgctctgccagatttcgtcggaggtgaacgccaagatcggcgcgaccagacgggtcatcgcatcgaggatgatatacatcgcagtctgcgcggcgcggcgtgcagcggagtccttcttctcggtgtacagacgatccttgatgacgtcgagatagaagttcgacatatccacaacgcagaagttatggatggcgtggtaagcctggtggaactcgaaggactcatagccctcgcgcaccttcaccatcagccgatccaaacggttcagcgcccacttatcgatggaaagcatctcagagacctctacactgtcggtatccggattaaaatcagaaaggttgccgagcatatagcgtgctgtgttgcggatctttctgtatgcgtcagaaagctgtttgaggatttccggggagatgcggatatcggcatggtagtcggaagaagcgacccacagacgcaggatatctgcgccgtacttatccacaatctcctgcggcagaatgccgttgccgagggacttactcatctttctgccctgaccgtccacgacccagccgtgtgtgacaacagccttgtacggcgctttgccgcgccatgcaatggacgtgagcagcgaagactggaaccagccgcggtactggtctgcaccctcaaggtacaggtcagccggccaatggagataatcgcgtgtatcgcaaacggcagcatgggtcacgccggaatcaaaccaaacgtccatgatgtcgcgctcttttgtaaaggaggtgcagccgcacttcttgcactttgtgcctgcgggcagaatttcttccgcttccttgatgtaccaagcatcggagccctctgcgcggaacagctcggaaactgcgtgcatcgcgtccttctcgatgagcggctcgccgcagtccttgcagtagaaaatcggaatcggcacaccccagcgacgctgacgggagatacaccagtcgttgcggtcacggaccatggaggaaatgcggtcttcgccccagcccgggatccactttacgcccttgatggcttcaatcgcctgatccttgatagcgtccacggagcagaaccactgctcggtcgcacggaacagaaccggcttcttgcagcgccagcagtgcggatactggtggatgatcttctgtaaagcgaacagtgcgcctgtatcctcaaggtgctgtgcaatcgccttgttcgcttcctcggtcgtcaggcctgcaaactggcccgcttcctcggtcatcttgccatggctgtccaccggcacaacgatcggaatttcgggatagtgattgtggcagacgtcatagtcttcgacgccgtggcccggagccgtgtgaacgcagccggtaccgctttccaacgtaacgtggtcgcccacgatgacgagagatgtgcggtcgatgaacgggtgcgccgtcttcatatactcaaggtcgctgccctttaaggtgccaaggatctcgtaatcggtcttgcccgccgcctgcatggcagattcggtcagggccgttgccatcacatagtattcgtcgccggactttacaagtgcatattcaaattccgggccgacgcaaatcgcgacgttcgcggggagcgtccaggtcgtcgtcgtccagattacgaagtaggtcttactcaggtctgcgcccatcggggtcaaaaggcccttgtcgtccgtcacgcggaacttcacatagatggagtggcagggatcctctgcgtattcaatctcggcttccgccagtgcagtctcgcactccgggcaccagtaaaccggctttaagcccttatagatgaggcccttcgtcgccatttcggagaagatctcgatctgctttgcttcaaattccttgcgcagggtgacatacgggttgtcccattcaccgatgccgccaagacgcttgaaggagttgcgctgctcatcgaggtagccgagggcaaactcgcggcagagcttgcgcagctcgatgtcggagattgcagtggaattcgaaacgcccgctttctttctggccttcagctcggtcggcaagccgtgggtatcccagccaggaacgtacggtgccttaaagccagacatattcttgtagcgaacgataaagtccttcagcgtcttattcagcgccgtgccgaggtggatatcgccgtttgcatacggagggccgtcgtgcagaacataaagcggcttaccgtcgttcttttcgagaacggtctcgtaaaccttgtcttcataccacttttcgagcattaccggctcgcgcttcggtaggccggcctgcatggcaaagtcggtcttggggaggttcaatgtgcttttgtaatccatatattgatccgtgcctttctgctggttttatcttctcttaaatttaccctttttcttgtcgccttcgtcttcaacgccgaactccagcgtgctgaaaagggcatccttttctttctgcaaagattccgggatgtcggcgtaagcgttcaaatcaagaccgatgccgctgaactgctctttaatataagagtccttgtcgtaaacaggctgcggctgtaccggtgccggtgcggggatcggctccggtacaggtgcgggaacgggcttcggctctgcgggggccggtgcgggttcctcttcgacctgctgtgccgcaggcactgggatttcttcttccggctcctcaatcacttcgggctcggtgtataccggcgtcggttcctcggcgggcgctttttcctcctgctcttcctccggcaggtcaaacgtcggaatcttctcaatcacagcaaggtgttctttatagatgccgtagagcgatgcgcggaagtttgtcacctcgcgcttcatgttctccagctctttctcttttgcggcgatctgcttttcataggacttcacaagcgtttcggagcggcccttcgcatcttttacaagagcgtccgccttcgcgtttgcgtcgttcacaatcttctcggccttcgcctttgcctcacggatggaagcattgccaaggcgctgtgcgctgaggatggcatccttaataccgtcttcctctgcacggtaagactcaatttttgcagccaaaatagaaagcttctcctgcagctcggcgtttttcgcctgtaactgctgcacagcggcggaatcatccgtcttgcgcgttttaatctctgcgttttcctttgtgagcgccgttacggtctccaaaacttcatcaataaactgatcgacatcatcagaattgtaaccggaaaaatttgattttctgaagctgacttcattgatgtctttaatcgataacatgtgtgtaagcctcctatatgtattttctgcatttcacagataaacggccctttttcgtgaccgggccgagcatatcaacaataaatcgcccgcagcggcgtatggagatgatgtctccttcatttacacggtgcgaaacggaatccgtctccctatggttgacggaaaccaaacccgcgtgcaccatctgcgcggctttttccctgccggtgcccgccaaaaaggcaaccaagcagtctaagcgttccgaagcgaccacgccgcccatcggctgaaagctgtgcgcctgcggcagcggatctgtaaagccctttgtaatctgcacccccacccgaccgatcttatcgatctgcgaaagaaagtgcggcgcaagctctgttttcacaaacagcacggcgcgcccttcttcggccagaatatcgccgagcgatgcacgcaccacgccctgtgccagaaatgagcccataaaatcgcggtgtgaaagcgcatcctgccggcgaaacttcaccgtgagccccgtcaccggaaactcctcatctaagggctccatataatccggaaacacgcccaaaaccgttcgctccgcttcaggaaagccaccgaaaaaccggtaattttccgcatgcgcacggcgcaaatattcttctgcgtacgcgcgctcggaaagatccaaaaagcccaaaaacgccggccttttttcgccaaggcgcaggcaatcctctattttcgcttcaaaaagcttatcttcctgtgcggccatatcagaacgttacgccgttctgtgcaagatcatcgcgaatctccgcaccgctcaggctcacgcccgcaggcgtgaaaatatacgtcttcgcggcgatgggtctcacctcgccgtggttcgcgtaagaagcgccgctgaggaacgccagaatatagcgcgcctcgctcgcgttcgtctcttcaaaattcacaacgaccgtatggccctggttgatctcatccgcaatgctatttgtgtcgtcacggaaagagttcggcttaaacacaaccacctgtgcgcctgcgcgtgcgtggttaatgttcacaacgcggttcgagcttgaagaggagaacgaacggcgtgcggaaggctgctcctcgcggctgtctgccgtgggctccgtggcctcgtcctcgtagtattcatcatactcgtcgtcgggcgggttccacattttctgaagcttctctacaatgcctgccatatattatacctccattttctgcataacagggtcggtcagcgcgtgtagtcgcgcgggccgaaaagcgaagagccgatgcgcaccatagtggcgccgcactcgatggcctccgcgtaatcggaagacatacccatcgaaaggcaattcataaatacattatctatttttttggcgcggatgtcaataaaagattgatgcatttgggaaaaataattgcatagcgcggatttttccgcacaaattggtggaattgccatcaatccgttcacctgaatgcccggcagcacggcaatttcttccaataacgcaggcagcgcagctttttcgatgccgcccttgctttcttccccgccgatattcacttcaatgagcaccggcattttgcggcctattttctccgcaaggcgggaaatttcctttgcaagctttacggaatccaccgactggatgcagtcgaccttatcgatgatatatttcaccttgttcgtctgcaagcgcccgatgatctggccggaaacgcccttgtcccaatcgatcttttcatatttgtccatgaattcctgcacgcggttttcgccgatgaagcgcaggccgcagccgatggcgtggttgatgacctccgccggcacggtcttcgttgccgcaagaaacgtgatgtcctcgggctttctgccggagcgtaccgctgcctccgcaatgcggttcgtgatgaccttatagttttcctctacgtccctaaaacgctcctcaaagcatttttccgtcataaagatccgtcccttccacaatgacttcatcgtaaagctgtatcgttctcgaggtgacgagctgctctttttccgaggaagaaaggttcagcttgcacacggcatagccgtcgatcgtcgcatcggagaatacctgcacaaagcgcacgcggctgccggacttgatgtaaacacccttcacgttctgttccacatgctccgtcacattgccgtccgtgtccgtatccgtcacggtcacatccgcaaagtggatggccttttcgttcacgagcacaccggcatacgactgtaaatcgatgcgcagcggctctttgcgcgcggcggcaaggtctgtgttcatgtaagagcacttcaaaatgaccactgcgtccccgctcgcttcgtccctattgatcttcacgacctcggccgggatcgtctccgccgtcgcaaacggcatctccaccttcacattcgtcgtgcggtcaagccgcacaaggtcgttttcatcgatgatgcacgcaatgtaccagttgaattcctttgccaccttgccgatgaccgtgctgtccgcattgctgcccgcttcgccttcttccagcgcacgcacatcgcttacggtcagctgctccacatcgtcgatgtccaccgcgttttcgtagccgtccaccgtatggataaaatagccggaagccggcgacgtcaccgtgccggtgcttgaagaggtcgtcgtctccagcgttgcacgctccgatttcaaattctcaatgtgcgccacatagctcgcggaatcctccgcgcccgtcacgatctgcttttggcccatcaagaggtacaggtcgtttttatcgttcgagatcgacgaaaacgcaccggatttcaaatcggaaagcagccctgtgaccgttttattgatctggctgccgatgttcttcgggttcgaggacgcgacctccgtggggttctccagcacggctagccgcgtaagctcctcgtcgatgcgcagcatgcggttgtgtgcggcggcgtcctcttccgcggggtacagctctgctaccgtgccgccgaacgccgttttctctccgtcgtccagcgtgtagttcaaaacgccgtcgtaccgcgagtacacaagctcctcgttgcgaataataaagcccgtggtgtcgatggatgcggaaagatcggcgtacatggccgtttccgttttaaatccggtgtattggcttctgtaaatctggtagcctacatatatcaaaagcaaaatcgccacggcgattgaactgattttacgaaataatgtgttgcttcccatagcggggcttcctttcagtcttcaaaatgcgcgcgggctatgtcctctgccgcgcttatcaggtctgccggggcatcataatcatccgcaaaaagccacacggcatcttcttcccggcggaaccacgtcaattggcgcttggcatagcgccgtgtttccctttttatattttcctttgcttcgtctaaggagcactgcccctcaaaatacgggaacaactccttgtagccgatggcctgcacggaggtctgccccggcgtgccacactgcttaaaataatcctcggcttcttttaataggccgtctgcaaacatctgctccacgcgcaggttgatacgcccgtaaagcgtctcgcggtctctgaaagacagcaccaacattttcccgtcatacggcgattccaccgctttcgagtccttcgcctgcttcgagaacggctcgcccgtcaccatgcagtattcaagcgcgcggatgaccctgcgcgtattattcggatggataccctcggccccctcggggtcaagctcttttagccgcgcataaagcggttcaatgccgtctgccgcaaattccgcttccaaattaccgcggatttcatcgtcacggctgttttccgtaaacggcaccgcctttaaaagcgagcgtgcatataagcccgtgccaccgacaagcaacacgtttttgccacgcgcatgtatgtcttcgattacctttcccgcaagcgccacatagtcgctcacgctgaacggctccgcgggatcctgaaaacccatcaggtggtgcggcacaccctgcatctcgtccgcggtcggctttgccgtgccgatctccatgcccctataaacctgcatcgagtcacacgaaaccacctccgcatggagctttttcgcaagcgttacggaaagcgaggtcttgccggaggccgtcggcccgcacaccgcgaataccttgattttctcttgtgtttccgtcattccggcacctccttttgtttacataactttataataacacaactttcgcccgtgtttgtgagcaaaccgttaaactctgccgaattctttttccagcgttcgctttttcagcatcacgtagatcggcctgccgtgcgggcagtagcgcacatcggggttcgcttccagctcttccgcaagtgcaatgagttcctcttttttcgaggcgttcccacccttaatggctgcgcggcacgcaatgttgtggtacagccagtccatgtgctccgtcgtcgcgtcggtcttgttttcttcaaggtatcccgccatttcgagcacggaatccttgatgtccgcaccgttcaaattaagcggcgcgctgcgcaccaaaacggtaccgctgccgaaatcctccacgtcaaagcccgcctgctcaaaaacactcaaattctgcaaaaccgccgtgtactcgtttttgtccatcgtcaccgtcacgggcacaagcagcgtctgcgccatagcagcttcttcgcggcgtttgagcttttcgtacagcaagcgctcgtgcgccgcgtgcttgtcgataaacatcagcgtctgcgcgtcgtattcaaggatgatatacgtgtcaaacacctcgccgatcaccttatgcgccgtgcgggacaaatcccgctccgtctccggcacaatgtatgtttccggctgtgtgttgctttccgggttttcctgcaccgcttccgtctgcacgggtgtttcctcccacgccggcggcacgggctccgtctcgggcggctgcggtaagggcggttcttccgttatcacttccggctttgtcaccggctgcggctccgcctccaaaacgcgctcgatcgacgtacgaatcctttcgagctgcggcttttcctcccgctctgcgctgtccgagaacgtatgcggcatcggcggcatatcgacgggcggctcatacggcgcttccgcctcttttttgctcgtgttgataacgggcgcaggcttcacgaccggcgcaggcatcggcttcaccgtctccgttttcggcggctgattcagcaccatttgctgcggctttacgaccacatccggcttatacgggtcgacgggccgccttgcgtgctgcgcaaggtcaacggacttcatatcgcggctcgccgtcacggcggatttcaccccgtggtacaccgcatcaaacaccggacgctcgttcacaaagcgcacctccagcttcgccggatgcacgttcacgtcgacgaccgacgacggcagctcgatgtgcagcacgcacgccgggaatttacccaccataatcgcgcccttgtacgcttcctccagcgccacacacgccgtgcggctgcgcacaaaacgcccgttgatgaagaaattctgcatgctgcggttcggtcggctcgcaatcggcgacgagatatacccgtgcacacgaatgccgcccaaggtataatccaccggcagcaaagcgccggaaaactccttgccgaacaccgcatagatcgccgagctcagcttgccgtcgcccggcgtgtgcagcacttccttgccctcgcgaatgaggcggaacgagatttccggatgcgaaagcgcaattttgtccatcagtcccgccacagagttgccctctgcggtgtctttcttcagaaacttcatacgcgccggcacgttaaaaaacaggtcgcgcgccgtaatggtcgtgccaagtgggcagcccgcgtcttcgatctccacgttgctgccgccctcggaggaatagtgcgtgccgattgaactgtccgccgtgcgcgtgatgaggtcaacgcgcgacacagccgaaatggacgccagcgcctcaccgcggaagccgagcgtcaaaatcgcgtctaagtcgtccttttcgcgcaccttgctcgttgcatggcgcagaaatgccgtcgccacgtcttcgcgcgcaatgccgcagccattgtccgtcacacggatatacgtcacgccgccgcggcgaatttccaccgtgacaatcgacgcgccggagtcaatggagttttccacaagctccttaatgacggaagacgggcgctccaccacctcaccggcggcgatcagctccgcgacctgcttttccaaaacgtgaattttcggcattttctgcaccttcctttcgcgttaaatttatttcagcatatttgcaagttcaaacaaaatgttcatggattcgatcggcgtcagcgtgttgacgtccagacttttcaggcggtttaaaacctccgtgtcctttgtcagcatcgtcagctgtatcggttcctcctgctgcactttcacggcgtttttcggttttttcaccatctcgccgctttcaaggctctttaacacctctttcgcacgccgcaccaccttgtccggcacgcccgcgagcttcgcgacctcaataccgaagctgtcgtccgcgccgccgcgcacgatacgccgcaggaacgtgatgtcgtccccgcgctttttcaccgcaatactgaagttctgcacaccgggcaaaaggtcttccagctccgtcagctcgtggtaatgcgtcgcaaacagcgtcttcgcaccgcacagctttttgtcgtgtacgtattcgatgaccgcccgcgcaatgctcatgccgtcaaacgtcgaggtgccgcggccgatctcatctaaaatcagcaagctgtccttcgtggcgctcttcaaaatttccgccacctcggccatttccaccatgaacgtggactgccccgccgcaaggtcgtcagaagcgcccacgcgcgtgtagatgccgtccacaatgccgatctccgccgcgctcgccggcacaaagcagccgatctgcgccatgatgacaatgaccgccacctgccgcatatatgtagatttacccgccatgttcgggcccgtaatgatagacacacggttctggttcgggtccatctcaagatcgttcggcacaaacggcgcgctgcccgtcagcagcgcctccaccaccgggtgacggctatcctttaaatacagcctgccgttcgccgtaatggtcgggcgcgtgtagtcgttccgcatagataccgccgcaaacgatgccaaaacatccagctccgcaatcgccttcgccgtctcctgcacgcgggtcagctgctccgcaatcgtcctgcgcacttcttcaaacagcttgccctcaagtgcaatagaacggtcgtgcgcacctaagatgcggttttcaagctcctttaattcctgcgtgatgtaccgctcgccgtttgcaagcgtctgcttgcgcacgtagtgctccggcgtcttgtccttaaacgcgttcgaaacttcaaggtaatacccgaacacgcggttatatcccacgcgcagtttcggaatgcccgtcgcttcgcgctcgcgcgcctccagctcggcgatgagctgcttgccgttcgtcatgtcacttttcacttcgtcaagctccgcgttgaagccctcgcggataatgccgccctcacggatcgtgtgcggcggctcctccacaacggcgcggtcgatgagctcgcaaatatcggagagcacatccatgcggctgtcgatgtcgcgcagcatcgtcgctttaaacgtcgcagaaagcgctttcagctgcggcaagcgcgtcagcgccgaccacagcgcacgcaggtctttgccgtttacagagccgtataccacgcgcgtcataatgcgctccaggtcaaaaatgcccgtcagcgcctcggtcacatcgtctaaaagcgggcggttctcaaacaactcctccaccgcgttttgccgcagcgtaatgcctgccgggctcaaaagcggctgctcgagccatgtgcggataagtcgcttgcccatcgccgttttggtcttgtcaagcacccacaaaagcgagccgcggcgctccttgctgcgcatcgtctcgagtaattcaaggtttcggcgcgtgtttaaatcaagccgcatcgtcttcgcctgcgaatatatgcgaatttcctccatgcgctccaaacccgtgatttgcgtacggccgagatactcgagcaaagcgctcagcgccgccgtgatctccgggaaattcaaaacgtcggagcgttccaaaacctcggggtgaaactgcgccttcacagttccttccgcgtgcagcggttcgtaaaccgcaaaatccatgcactcgagcgacgccgaaagcttatcggaaatgaatttcgccacgtccgtcaaatcggtaaattccgggttgatgaggatttcgcgcggcgtaaatcgcgacagcgcgtcgatgaccgcgcgggagagcgtctcgcccttctccgccgtcagcgtcgtcgcttccagctcgcccgttgaaatatccgcaaagcagatgcccaccttatcaccctgataatacgcggaagcgatatagttgttcttcgcctcgtcgagcatgctgctttccataacggtgccgggcgtgatgacgcggataacgctgcgctttacgatgccctttgcaagcgccgggtcttccatctgctcgcagatggcaaccttgtagccctttgccacaagccgcgcgatatacgtctccgcgctgtggaacggcacgccgcacatcggcgcgcgctcctcctggccgcagtcacggcctgtcagcgtcagctccagctcacgcgacgcgattttcgcatcgttaaagaacatctcgtaaaagtccccaaggcgaaagaaaaggagcgtgttcgggtacttttccttcacttcaaagtactgtttcatcatcggggaataatcagccatgcccagcctccatatcgttaagattcagtcaacaagtgaattactaccaaaggcagatttttgtaaagtaggtgcgcgagatgcgccgtcagatttttcgtcatgagcgtatacgccttgcgtagtaaattccgcaggcaggctggcgtctgtcaaggactttacgaccggtatggcggaaaagatgcaagcagatcacgtgcaaactttgcaaaattctgccttagtggcagccaccgccgcaggtcgcacagctgccggtgcagccgcaggcatcgggatcgcagccatccgggtcctgaccctccgcgcacatggaaagcacacccgtcacgcgctgcatcagcgcatcaaactcgttctttgccgcctgatacgccgccatgtgctcgttctgcatcactctgccgtaaatctcgcgcagttctttgttgtactgctcgataagttcctcgctgcggtcttcctttgccgcctcgttgttgatggccatgcgctttaagttgaattcgccgatggcgttctgcaaagcttcgtcctcgttgcactgctgctccgcaacgctcatgttgatgtaggtctggtcctgctgcaaagcgcggccaagttctcttgtcagtttcatgatatccatagtaatagctccttaaaataaattataaattttattgtattttgaaaaagcaatgggtcaaaacccgttttgcttagtctacacattcgccgcgcaaaatccagttgcgcgcttcggtcacttttacatttttgaattcgccgatccattcgtcttcgccggggaattccacaatgatgctgcttgcggtgcgaccgctgagcaaaccgtttttctcgttgcgctcttcaataagcacacgctccgtgctgcccaccatggaagcgcagcgctttgcggcaatctcctcctgtgtcttcaaaagctccgagaaccactgcgttttctccttgtacgtgacagggtcttccatttcggcggctctcgtgccggggcgcggcgagaaaataaacgtaaagagcgatgtgaactccacctcgcggatgaggctcagcgtctcgcagaactcctcatacgtctcgcccggaaagccgacgataatgtcggaggtcagcgacagatccggcattttctctttcgcatagcggatgaggtcaaggtatttttcgcggtcgtagtggcggttcatcgcctttaacacacggctgctgccggactggcacggcaggtggatgtagtggcagatgtgccggctctccgcaatcgtgtcaaacagctcgtgcgtcgcgtccttcgggtgcgaggtcataaaacgcaaacggtagtcgccgtcaatcgcgtcaatgcggcgcagaagctccgaaaaattcactttctccggcaagcccttgccgtaggagttcacgttctgtccaagcagcgtaatttctttgtagccctgctcaatgagctcgcggcactcggcaacgatggcatccgggtggcggctcttctcccggccgcgcacatacggcacaatgcagtacgagcagaaattgtcgcagccgtacatcacggtcacccacgcgcgcgtattgccgtcgcggcgcaccggcaggccttcaatgatctctttcgattcatgcccgcgcaaaaaaacgcgcttcgagtcggtcacggcggtgtacatcatctccggcagtcggtggatgacgtgtgtgccgaacacgatgttcacaaacgggaacgacgccttaatgcgctccgccacgcgctcctgttccatcatgcagccgcatacggcaatgagcagcgacgggttgcggcgtttcacgtttttcagcgcgccgatgttgccgaacacgcggtcttcggcgtgctcgcgaatggcgcaggtgttgaacagaataaaatcggcttcatcttcatcttcagtgaattcaaagcccatttcagagagcatacccttaatgcgttcgccgtccgccacattctgctggcagccatacgtgcgcacaagcgccttcggcgtgccgtgcatcgcgcgcacctgcatgatcgccgcaacgtccgccgtgtatagcttctgcttttgcagctcgtctgccgtaacggtgatttctttatccttcaaaaaacattctcctttatcgcacgcagacaagctgtctgcggtaagctgtcataatgatacagagtatactataccacaaatcggcatgattcgcaaggcgaaatccaccgtttcccaatatttacaatttcgcaacacgtatttcccgcaagacgcaaaaacggcggctctaaaaatcaaagccgccgctaaacttattcgattgtcactttcgtgccgcccgcgctgcgcacggagagcacatagcagctcttttcgccaaacacgctctgcatctctgccttgaacgcgtccagcatatcgagcggcacatacgcctgcaccgtgccggcaaagccgccgccgtgcacgcgatacgcgcccttgccaccgagaatcttcgcaataagtgccaacgcgagggacaagccctgctcctgcggattcacaactgcgaacacattctgcaaattcatcgccgaggaatgacccgaggcaatcacgcactgcttgaacgtctcaaagtcacccgctttcagcgctgccacttccttatccaccacacggttgtcgtcgaagaagtgaatcgcacgcaaaatcgcgcggtcgccgacttcttttctgagctcgggaattttcttataaaattcctcctcgcttacctcgcgcagcacttcgccgccaagcgccttcgcaacgcgcttcatctccgccggaatggctgcgtattcgccggtcaggtcggcatggtttccgcccgtatcgacgacgcacagtgcatagccgtaacggtcaaggtcaaaatcgatcttctcaatcttcggcgcggaaaggtctttaaaatccatcgtcgtaaagccgcccacactcgccgccatctggtcgagtaagccggagggcttgccgaagtacacgttttcggcaaattttgagatctgtgccgcctccacggggtcgatcgcgtcgtcattatacaggtggcttaaaatcgtcaccacaagcacctcaaacgccgcggagcttgaaaggccggagccctttaaaactctcgaggtcgtcaccgcgtcaaagccgcccacttcatagccgagcgcctttaagcgtgcgcacacgccgcggatgagcgacgccgagcgctccttttccgcttcctgcacgttaaggtctgccgtatcgaccgtgtccatcgggaacccgacagatttcaggcggattacgccgttctcggtcttcttcaccgccgcaataacgtccagattcacagccgccgccagcaccttgccgttgttgtggtcggtgtggttgccgcccacctcggttctgcccggcgcactgaaatatgaaagcgcattagcatccccgaactcctccgcaaagtaagcggaaagctcctcataacgcttctgctgctcggtcgcttccgcgccgtacagtgtttttaaatcgatgaccatgctgaaaaacctcccggtttattttttgagcatctgtgtaaattttaatttatgtactttagattcgataaacgggcggaatctttccaacgtttccttttccatgtcttcttttctgaataccatggatttgccgttatcaaaatacatgatgtagtgctgtctgctctcgcccacgtcgatcatgtgcttataatcgaccttgatgcggttgccgtttttcatgttgatgacgctgttcgtcatgaaaataagcgtcgtctccgtcaggtgcatcacggcaggattattgttgcgaattttagaaagccagcgcgtgcagcgaatgacaacaatcagcgtaatcgccacatacatgataagcagcgataaaatgaaattgcccacgtaaaaatgccccgcgttgaacgcaaagaggaacgagaacacgagcggcacgatgataaacgccgggatgagccacttaaagcgcccaagcgtagagtaataaatgaatgccttgtagtcgtcctcgccgatctggctcgtcacgcggaattcttctttttccggcgctttcttttcttccgccttcttctccttgtccttcggcgtttcctttcccgtcagctcgcggatatagcggtcaatgtcctcatcggtctccacggctttttcaagcgcttcgtccgtttttctttcttctgccattatgcttcgttcctttccgtgttgtcctcaccgtttaaaagcgtcaaaagctccgcttccgtcaatacggggatgcccagcgtctgcgccttcgtaagcttgctgccggcttcttcgcccgccacaacataactcgtctttttcgagaccgagccgctcaccttgccgcccgccttttcaatcagtgccgcggcctccgtgcgcttcaaattcggcagcgtacccgtcagcacaaacgtcttgccaaggaatttcgtgtccgtcgtgaccgcttccgccgtcatgttcacgcccgccgcttttagccggtcaatgagctctatcgccgagtgtcttctgaaaaacgcgtagacctcctgcgccataatgccgccaaagccgtctatcgccgcaatctgctcctcgtccgccgcaatcaaagcatccatatttccgaatgcgcccgcaagcagctttgccgccttcgcgccaatgtgcggaatgccgagcgcaaacagcagctttgataaatcgttttctttcgatttttggatcgccgcaacgaggttttccgcgctctttttgccgaaacgatcaagcgtttcaagctcctgtgccgtaatgtcgtataaatcagccggcgagtgcacccgaagcgctgcgctcagctgctccagcgccgccgggcccaatccgtcaatgtccatcgcgtcgcgcgacgcaaaatgaatgaggttgcgcatcagctgtgccgggcactgcggattcgtgcagcgcgctgccgcttccccctccacacgcgtgataacttccccgcacgaagggcacgtttccggcaaacggtacggcacggtatcctccgggttcgagaccacggaaacgacctccgggatgatctcgcccgcctttcggataatgacgcgcgaaccgatgcggatatccttttccgtgatgaaatcctggttgtgcagcgtcgcgcggctgaccgtcgtaccggctaagaacaccggctcaaacacgccggtcggcgtcaaaacacccgtgcgccctacagcaacttctatgtcaaggagcgtcgtctctttttcctccggcgggtacttgtacgcctccgcccagcgcgggaacttcgccgtgcttccgagtgcttcgcgctgagagaagctgtccacttttacaacagcgccgtcaatcgggtacgagaacgtgccgcgctcgttgccgatctcgcggattttctcgattaccgtctctatgtcgcccgtgcggcaataaagcggcgacaccgtaaagccaagctcgtgcaaacgcttcaatgcgtccgcgtgcgtcgtgacggtctcaccctcgatgacctgaatgttaaaaacaaaaatatccagcgtgcgctgcgccgtaatcttcgggtctttctgtcgaagcgaccccgccgccgcgttgcgcgggtttttaaacggcttttcttccaaaagctcctgccgctcgcacagccgcaaaaagctttcgtccgacatatatacctcgccgcgcacctccaaaaacggcagcggctctttgagcgtcttcggtgcggatttgatcgtaccgatatttaacgtcacgtcttcgcccgtaatgccgtcgccgcgcgtagagccgcgcgtgtatacgccgttcacgtattccaacgccacggaaaggccgtcgaatttcggctctaccacatacaccgggtcgtccacaacggcgcgcacgcggcggtcaaagtcgcgcagctcgtcttcggaaaacgagtcgtgcaggctctccatcggcacggtgtgcgtcacttccgcaaatgtgttgtaccccgctgcgcccacgcggttcgtcggcgagtcctctgttttcagctccgggaacgccgcttccagattttccaagcggcggtacagcatgtcgtacgcatagtcgctgatctccggcgcgtcctcggtgtagtattttttattgtgatactcgatctgttcccgcagcgcctcaatctgctgccgggcctgttcgtgcgtcataagttaaaactccgtgtcatttcaagatatttcgatgcttgttagtatcttaccacaaagcgcgcgaaaatccaacggctattcacaattttttatcctgcgcgcaccacgccgtactgcggcacgtcgcccgcaagcaccgcttcatacacggggtatgctgccgtcaccgtcacaggctccgccccctctcgctccgccgtgaacagcaccgcttcaatatgcagcaccgttcggtacgccgtgcggttgatgcccgcgcccgtcaagacgctttcaaaccgcaccgaaacggcactttccaccgaaaaccgcacgggtatcttcatcccgcgcccgttcaaaagcatcagccccgttaaatttccgagcggcacaaacgcctttgccgtgccgttcaagcttttccgcaaagcatccgtcagctccgcttccagtacgccgagcgcatatgtagaaagcgccgtctctgccccgtccttttcgcagacggtctgcggcagatactccggcaccgttttcgcgatgcactcttgcgcgtgcgccgtcagcgctgccgtgcgcagctccgctttcatcgcgggcagtcgcagctcggcaaatacaaaagcgaaaacgagcagcaaaaacgccaacacgcgccgtttacgtccgcgtttataccgtcttcggcgataccggtacataaatcatcagtcctttccgatacgccagtatacgccgaaaaggactgatcgtgcctgtcttatattttgtctgcctttaaaagctttttcgcttcctgcatcacgtgcgccgcaggcagaccgaaaatgttgttgtagtcgccctcaatactctctacgaacagcgccgccgggccctgaatgccgtagccgccggccttacccatcggctcgccgctctgcacgtaagccgcgatttcgctttctgtcaggggatagaactttaccttcgtctcctgactgaacgaaacgcgctcgccgtgatacgccatgcacacgccggtaaacaccgtgtgcacatgcccggaaagcaggtgcataaaacggtttgcgtctgctaagtctttcggtttgccgagaatttcgccgtcgatgtacaccaccgtgtccgccgcgattacaagatcgccactttcgcacttcggcaaaaccgcttccagcttgcggcgggaaagctcctttacaagcgcgtccggcgccttcggcccgttcgattcatcggcattcgaggcgatcaccgtaaactcgatgcccgcgcgttccagaatctccttgcggttcacggaggacgaggctaaaacgaagcgtaccatcagccgttgtagccgttcgggttctgcgtctgccagcgccaggagtccgcacacatgtcgtccagcgtcttctgcgccttccaaccgagctcctcatacgccttcgtgcagtctgcgtagcactccgggatgtcgcccgcgcggcgcggcttgatctcatacggaatcttgtggccgacgcacttttcaaacgcgtgcacaatgtcaagcacagagtaacccacaccggtgccgaggttgtagatcttcacgccgcagtgcggatcatcgaatttcttgagcgccgccacatggccctctgcaaggtcgacgacatgaatgtaatcgcgcacgccggtaccgtccttcgtcgggtagtcgtcgccgaaaacgccgaggcagcgcagcttgcccaccgccacctgcgtgatgtacggcacaaggttgttcgggataccgttcgggtcttcgccgatggtgccgctcttgtgcgcgcccaccgggttgaagtagcgcaggatgatcgggttaaaatccgggttcgcgtgcgcgtagtccttcaagatgcgctcaatcatcagctttgtcgtgccgtaggggttcgtcgtcgaaagcgggaaatcctcgcggatcggcacggaagccgggttgccgtacaccgtcgccgaggagctgaacacaaagttgttcaccttaaactccgccatcaccttcaaaaggctcaaagtcgaaatgaggttgttttcatagtaacgcaacggaatctgcacggattcgccgactgccttcaggcctgcaaaatggataacggcaaaaatctcgtcctccgcaaagatcttgcgcagcgcgtcttcgtcgcacacgtccgcttcaaagaacttcacttttttgccgctcaaattttcaatgcggtctaccaccagcgccttgctgtttacaaggttatccacgatcgtcacatcgtagcccttttcaagaagagaaatgcaggtgtggctgccaatgtagcctgtgccgcccgtaaccaaaattcttttcataagaaaccgacctttctgtctttctgtctgtactgattatacacagtttccaccgctttgtacagtagcatgcgtatcttttttgatgcttatttatttcgactttgttgcttcttttgcaataggcgtacaaaaagcgggcatactgaaaaggaaagtcatgaaaaaggagtcgtttcccatgaaccgtaccgtccgcaaaaacagtctgttgttcctcgccggcagcggcctttatcctcttttggaagtgctgtggcgcggctattcccacgcctccatggcacttgccggcggcgtttgtctgctgctcatcaacgccgtatgctgcgaaaaaatgaaaagaagaagccttccggcgcgctgcgccataggctccctcatcataaccgttgtggaatttttattcggcctgctcgtaaaccgcgtgcttcatctgcatgtgtgggattactccgccctgccgctcaacatcatgggccagatctgtctgccgttttcgctcatctggttcgttttaacgatccccgcaagcgccctgtgcaagctctgctgccgcctttccgccttcccgaaagagacaaaatccgcctcggtcatcacagacccttgatatatttttggaacaccggcaaaatgccgatcttgtccggcgcctgcaacggcatctgcgggaacgcgtcatggcccggcatgttgttcgcttcaataaagagcgggccgtcttttgtgatcgctacgtcccagccgatgtagcccatctgcggcaccttatgtgccgcttcacggcaaatgtccatcaccttgtcccagtacggaatctggtagcccttgagcaagcaccccgaacgcgggtggcgctcatagacgatgcgctgcttgtcgcacgccgcgcacgcgattttgccggtctcgaggtcgatcggcgaatacatgccgccggcattgatgttatccaccgggcggtcgctgttgcccatgcggatgcacgcatacaccacgttcgacacaccgtcggaaagcaccgtgtacacgcggatggtattgacggatccggggttgatgcggttcatatccgggtgctgaatgacaacctcttcgatcacgtccgcgccctttttctttaagtcctcgtacatagcgtcgagcgttgcgtagtcggcctttttcagcttttccacacccacgccgcaggaagcgtcatccggcttgcagatgatctcgtctttgtcctgcataaagtccaaaaactgctcttttgtgcacttggaaaaatgcagccactcgcggtgcaaatattccgcaaacgtcgtgtaaaactcgcttttattatcaaaaatatggtaatacgcggggtcgttgaggctttttacaatggagttattgatgccgcgtgtcacatacgtcgcacgctgcttgtcattcaggtcataaaacgcacataaaaggtaatccttgtagcccgcaccgtacttaaagccgcacttgatgatgtcaaaaaacagccaaatgcggtttttaccgctcacctcatgcaccgttttcaccgtatcgaacagcgatttataatccatgtgcagaatgcagtgaaaaatatatttcagtcttcccataagccgccccttcttacagccccatcagctttttctgcttctctaaaatgcgtgcgcggcggcgctcggtctcctccacgtcgatggaaagcacaccgtcatcggtaatcttcagcacgtcgccggcctttgcaccctgcggcagctcgctcgtttcaatggcgaaaaacgccttgtccttgtcttcgcagatcgcgtaaataccgtcaaatcggtcgatggtgatttgtttcatatcatctgttcctttccgtaataccttttatatagcagcgggttatttcccgttttccgtgtaaattttcgtttcaacgccgtccgtcaaaatcgcaataccgccgttttcgtccgtgcggaaaatttcaacgccgtggtcagcgagccgtttcagcgtctcatttcgcggaagcaaatttctgtcttcgcccgaggagattaccgcatactgcggctgcacagcttcaagcaatgcatcgcttgtcgccgaagcgctgccgtggtgcggcaccttcaaaacatccgcccgcagcgtgtcgccatatatatccagcagcagtctttccgctttctcctcaatatcaccgcagaacagcatggaaaactccttgtagcaaagcttatacacaagcgaattctcattcgtgctctctaaatcttctgaaggcgcgagcacccgaaattccgcctcgccgtaagagatcgtctccccggcacttaccgttcgcacggtttgatcttccggcagcccggtcagctccgtgtacatggaggtgaccacctcctctgcgggcacctcccgcaaaatttgcgtcagcccgcccacgtggtcgctgtccgcgtgcgaaatccacacggcgcgcagcttttgaatgttccgctgttttaaaacgcgcagcacggttctcgcctgctccgctgtcgcgcagtccgaaagcactgcgccctccggcgtttcgattaagattgcatccgccttacccacgtcgatgacataaaccgtcaaatcggcatcgggcaagctctgtgcaaacggcagcaggccgcatgcacgtttaatctccgtccacatcgcccgtccgggcggcgtataacagaacgccaaaagaaacgaaacaagtaccaacgcgcctgtgcgcacaagctttctgccgtcccgtgcaccgcgctttgtgttacgcatcaccgggggtatcctgcttttgcatgttcatttccagccactgcgcataggtgatgagtacttggcgcggcttcgagccctcgtgcggacccacaatacccatctgctccatctcatcgatgagacggcccgcgcgggcgtagccgagacgcagtctgcgctgcaaaagcgatgtggaggcctggcccgcttcaacaacgcacttaatggcttcgttcatcatcgggtcaccgctgccctcatcgtcattgctgccgctgtcgctcgattttgagccctccacagcgctgcgctcaatctcctgcgcaatggagtcgtcgtaaataacgcttctcgaattcttcacgaaatccacgacggattcgatctcgctgtcgctgacaaagcagccctgaatacgcagcggcttctgcgcgccgaccggcgagaacagcatatcgccctgaccgagcagcttttccgcaccgccgctgtccaaaatggtgcgggagtcaatggcagaggacaccgcaaacgcgatacgactcgggatgttcgccttgatgaggcccgtcacaacgtccacggacgggcgctgcgttgcgaccacaaggtgcatgccggcggcacgcgccatctgcgccaagcggcagatcgcgtcttccacctcgttcggcgcggccatcatcaggtcggaaagctcgtcgatgatgatgacgatctgcggcattttgtgcatgggctgtccgttttcgtcctgataattgttcgcctgcgcgagggcgttgtagccctttaagtcgcgcacgttgttttcggcaaaaattttgtagcgcttcagcatttccgtaacggcccagttcagcgcaccggccgcctttcgcgggtcggtgacgaccggcaccaataggtgtggaatgccgttataaatgccgagctccacgaccttcgggtcaatcatcaaaaagcgcacatcgtccgggccggatttatacagcaggctcacgataagcgagttgatgcacacggatttaccggagccggtcgtaccggcaatgaggatatgcggcattttgctgaggtctgccaccgttacctgaccggcaatgtcgcggccaagcgccacggtcaagtggctttttgaagtcacaaagctgtttgattccacaagctcgcgcatgcgtacgatggtcttcaccttgttcggcacctcaatgccgacggccgccttgcccgggatcggcgcttcaatgcgcacgcccgttgcggcaaggttcattgcaaggtcatcggcgaggttcgtgatcttgctgattttcacaccggcggcaggctgcaattcatagcgcgtaacagccgggccgcggcaaatatcgagaattttggtttgcacaccgaagcttttcagtgtttccacaagcagcttgccgtttgtctggagctcttcggtctccacggcggcatctacttttttgccggaagcaagcatcgtaaccggcgggaaaatatatgagctgtcttcctccttcggtgcagattgcgcaggctgggtctccatgcgttctgcttccagcttctttttcatgaattcttccgtcgccttctgcgcgtccgcggcggcttccgcgctgtgcgcgggcgtcaccggggacgacgccggcgcaaggattgtcggtgtggccggctgtggcgcaggctgtgcatacgcactctgctgcacaggtgcaggctccggctttgccgtctgcataacgggcggcataatcaccggcgcttccaccgtttcgcgttccaccggcacgtgggtctccggcgtttcagcaggctgcggcgcggggcgcacttccgcctgcaccggcggcgtataggtcggctgcacattttgcgcaggctgtgcttcacgctctaagccgggcacgcggaaatccggcacacggcggttttcgtcgatcaatgcgttgatctgtgcggagctttcggtgtaatcgtgcagcactacggggtcgttatccggctccgtgcggcgcacaccgaaaagctgctccaaatacacgcgcggcgtctttcctttgtttttcgattccattttaccatcctccgggacagagcgcaccgggtgctgcggcaaaaccgtttcaaacggcgattcctccgcattaccgcgctcctcttccagaatgcggcgctcttccttgcgctgccgcgcgacgtcgcgaatgacgaccgccggctttgcaatttttttaaaaaagctcgcgagcgacgtgcccgtaaagatgagcacggagacgaacagcagcacgcccgtgatgatgcgtgcgccaagcacttccgcgcacttgacgagcagctcgccgacaaggccgccgacaagaccggccccgccctgctccacgccatgcatatataagatgccgaccagcttaaaaaaactcttttccttcgggaaaaagctgccaaacacatgccccgccgtgcaaaacagcacgacaatcacgaccatgagcgccaagcgcccgccgcgcagcatggtggtctgctccatcgttttgctgacggcgatataccccatcagcaccgcaagcaggatagcccagccgccgaacacgccacgcagcacgttgtgcaccataagccacacgctgccgcccggaatgagtacaaagcacgccgttaaaatggccgcaccgaaccagagaatagcttctgtctggttgcgctggcgcagctgctctacgctgggtgcgctctgttttgaagacgtgctcttcccttttgcggaagacgcacgcgatttagtattggacttagaacccgagctccgggtgtttttggcagccgatgacttcgcaccgcttcttgctttggaagcactgccctttgctgtactttgttttttacccgccaaaataaacctccggattataaatcaccggatcaaagcggcatgccggtgaaaagatttgtgcccgtgaccgcttcgataacggaaacgatgagcgttataacgccgagcaccagcgtataataagcgaaaacctgcaatttgttcgtggtgacaatccacttgagcagcttgatggcgaggaagccgacaatagccgccgtaacaacgcctgcgatcattgcaccgacgccaatgtcgaccggctggccgattgcatctttaatggtgagcacagctgccgccaaaatggacgggatgccgagcacgaaggaataatcgagcgctgcctgctggttgatgccgcgcagaagacctgccgccatggtggagccggaacgggaaaggcccgggaacaccgccgccgcgcactgcgtgacaccgacgcaaatggcgtctgccgtgtggaactttgtgcggccgcgaatctcgccgactttgccatccttacgcgtaaagtgatgtacctttgcacccttggaagcacggatgccgaggaacagcagggcgcttgtcatgaggagcgcaaggccctcgatccaaatcgtcgaatccgaagcccacagctccgaaatatcttttaacttcatgcccgtgcccggaaccggcaggaacaaaaggaacagcgggataaggccgatcatgagcatcatcaaaagtcggcggtcatgatccatatctttccacttgaatttgccgcggaatacgtctgcaacgagcgaaataaacgccttaatgagccgccagatgagcttataatagacggcacatacggcgatgagcgtgccgaggtgcaaaagaatgtcaaacagcaagctatctacctttacacccatgatgtgctgtgcaagcgacaagtgaccgctgcttgagacgggcagaaactctgttgcgccctgtacaataccttgaatgattgcttcaaaaatagacattatgtaatctccttttctgcggataatttggttttgttcgtttttatcggtataattatacgataaataaaaagttatgtaaacggcaaatgccgtttttagagtgatttcttgccttttctgggctttgcacgctgcttattcttctctgcggcaatcattttgtcgaggcaatccatggcatcgtgcaggctgccgagcgtatcaataagcccctctgccacggcttcatcgccgtccagcaccgtccccacgtccatgacgagctcctgcgtattcatggcgagctgcataaagcgctcataggaaatgccggaatttgccgtgacgaaattcgtaatgcggtcctgcatgcgctgaaaatactccagcgtctgcggcacgccaagcattaggccgctcatgcgcaccgggtgaatggtcatggatgccgaaggcgcgatgaatgagtgctttgccgccactgcaagcggcacgccgatggaatgtccgccgccgagaacgagtgacaccgtgggtttgcgcatgccggcgacaagctctgcaatggcaagaccggcctccacgtcgccgccgaccgtgtttaaaatcatgagcaggccgtcgatgttcgggtcctcctccacggagacgatctgcgggatcacgtgctcgtacttcgtcgttttgttctgcgacggtgcgacgtaatgcccttcaatctgtccgatgacggtgaggcactggatggtgtgctttcggtttttggtaacgaccgcgccgccctcgcggatctgcttctggcggtcggaaaggtcttcgttttcttcttcggcttcgtccgtttcctgcatggaaaaagacgagcgtttttttgtgcttttcatgccgcagcgctccttttgaataagatgcgcttagttttcacagaaaatgcggaatcatacgcggcacaaactttcacgtatatcagtatagcacgcttttacgcatcctgcaagggcaaagcgcaaacatgtccgccgatgtcctgtaaatacatagtatgcacgttttgcagggtttaactgcatttcctgcaatttcatgcaatttattcacaatttacgattgacttttcttgcaaaatatccgataatgatagaaacagcgtcacattctccccccgtgacacggagcttcgcggtgcagccgcagaaaggtaaggctttgaaatgtccgattttacaaagattcccatgaaaacgccgcttgtggaaatggacggcgacgagatgacccgcgtcatctggaaaatgatcaaagatattttgctgaccccctatgttgacctgaaaacggagtattatgaccttggtctggagcaccgcgaggcgacgaaagatcaggttacgatcgattccgccgaggcaacgaaaaaatacggtgtggctgtaaagtgtgcgaccattacgccaaacgccgcgcgtgtgaaggaatacaacctcacagagatgtggaaatcgccgaacggtaccatccgtgccattttggacggcacggtgttccgcacgccgattttgctgaagggcatcacgccgtacattccgacgtggacaaagccgattaccattgcgcgtcacgcgtacggcgatctgtataagaacgtcgagatgcgcgtgccggaaaatgcgaaggctgagcttgttgtgacaaaagcggacggcactgaggagcgcgtgaccatccacgaattcaaaacgccgggcgtgattcaaggtttacataatattgataagagtattgagagctttgcacgctcctgctttaattacgcgctgagcatgaagcaggacctgtggtttgcggcaaaagacacgatttcgaagacctacgaccaccgctttaaggatattttccaggaaatttacgacgcggaatataaagagaagtttgaaaaagtcggcattgaatacttctacacgctgatcgacgacgccattgcgcgcgtgattcgcagtgaaggcggctacatttgggcctgcaaaaactacgacggcgacgtgatgagcgacatgatcgcgacagcgtacggcagtcttgccatgatgacctccgtgctcgtctccccagacggcgtttacgaatatgaagccgcgcacggtacggtacagcgccactactacaaatatttgaagggcgaaacaacctccacaaactccgtcgcaacactgtttgcgtggacaggcgcgctgcgtaagcgcggcgagctggacgacctgccggagctgagcgcctttgcggacaagcttgaaaaggcaaccttgcagacgatcgaagaggacggcatcatgaccggcgaccttgcggcgatgtctactctgccgaatgcaaagaaagtggacaccgagggcttcctcctcgcaatccgcgatcgtttggagcaacttctgtaacccgacatggatttgaaaagcgtgggcggcctccctcctttttagggtctggccgcccgtttttcttttcttatttataaaaaacacttgcacaggtctttatgatgtgctaaaattttgtcaaacgaggtgatgatatgcagaagaaaccgtatatttccatgccggtcattcggcgtctgccgcgctactatcgctttttgcggcacttggacaagcgcggggtgacgcgtatttcctccaaggagctttccgaaaaaatgggcttcacggcttcgcaggtgcgtcaggatttcaactgcttcggcggctacggccagcagggctacggctacggcgtgcaccaactttgcgaggagattggctctattttgggtgtggaccgtgcacacaagtgcattttaatcggtgcaggcaatttgggcaaggccattgcgacgcacatttcttataatttcgcgggatttgatctcatcggtatttttgacaacagcgaacaggtcgtgggccagcagattgccgacctgcgcgtactccccgctgcgggcatccgccgcttctgctcggaaaacgcgcccttgatggcgattttgtgcgtgccggacagtgccgtgaaatcggtcgtggagctgctttatgacatcggcatcaagagctactggaacttcagccactacgacattgccctgcgctatccggacacgatcgtggaaaacgtgcatctgaatgacagcatgatgacgctgtgctaccgcgtgaccgaaaacgaaaaaagttcttaaaagtcaaaaaatagctgttgacaattcagctgcatcatgctataataattgagccgtcaaacgagacggcaaaaagaatatgcaggtatggcggaattggcagacgcgtatggttcaggtccatatgaatgcaagttcatgcaggttcaagtcctgttacctgcaccaaaaagaccgttgtcgaatgacaatggtcttttttcaacgaaattcgccttacggcgagtaaactaacaaccttcggttatcgtgaaattgcttcgcagtgagctgcgctgcgcgcgttaagagtgaagttcctttcactttctgcatacgcggaaaacttcacaaatacggcagcactcatttcacatttcgcaaagcgaaatatatcactaaccccaccgcccataaagacaaaatcttatctttgcgggcggcggggttttatcatctctctcccatcaccgcagccgtaacggctttagctaagcggttgacggcttcggtgatgcaggcgtcgggaatttcggagtagctgatgacgaatgcggtctgcgggtttacgggcgctgcatggtaatacgccgaaagcccggtgacgcgcacgccgttttccgccgcgcggcgggtgatcttttcggcgggcacaggtccgcagacacgcaggagaaaatgcagaccggcgtcttcggcatcaatttttgcaagctttaacaaaccacagcgcttcatctcttttaagatgaggtcttttttttgcttataacggatgcgcatgcggttgatgtgcttttcgaaatagccctcggaaatgaattttgcgagcgtgtactgctcgaggttcgagaccgtgcacgcgtagaacccaagatttttgtaaaatgcttcggcgagcgctgtgggcagcatcatgtagctgatgcggatggtgctggcaaggctttttgaaaacgtattcatgtaaatgacgcggtcggcggaatcgatgctttgcagcgccgggataggcttgccggtgaggcggaactcggaatcgtaatcgtcctctatgatgtaacggttttcgctctgcgcggcccaatcgagaagcgtgtaacgccgtgcgatgggcgtgacgatgcccgtcgggaagtggtgcgacggcgaaatgtgcagaatatccgcgccgcttttttcgagcgctttggggtctatcccctctttatccatcggcgtgaaacggtactgcacgccgtagctctcgtacacctgcgcaattttgcgatagccgggatcttcgagcgcgtagaccttatcgaaccccaaaagctggatgagaagcccgtagagatactccgttccggcgccgacgacgatgcagttcgggtcggcatcgatgccgcgaaactccctaaggtgctcggcgatggcgcaccttaactcgaacacgccgccgcacggggcgtttaccataagctcggcgcttttttccgagatgatctcgcgcatgagcttcgcccatgtggcaaacgggaaattctgcgggtcggtgcggctgctggaaaaatccgcaaaatatttcggcggtacgggcatttgtgtccggggactctcttttttctgcggagcggtgcttttttccagattggcggcgaagaagccttttttcggcaaggcgtagacgtacccttccgagacaagctgcgcataggcgttttcgaccgtgatgacgctgacgccgaggttttccgcaaagctgcgcttagagggcaattttgtgccgggcgtgatcttgcccgtcagaatgtcctcacggatgcacttatacaggtacatataaaggctttcggagccgatttttgagaaagaataggtgagcatgtaggttctccgtgatctgtcgcgttttaatttagtatagcggactcttgcacaaatgtcaaagccatggtatgatgaccttgaaacggaggggattgcatgccgaacgaagcgaagcttttatatgacgcgctcctgtatgagaacgggcacctgcgccgcacacagcacattttaaaggtatacggccttgcaaaaatgctgggtgagttggaaaatcttcccacccacgagcaggaaaatctgcgcgcggcggcgattttgcacgatatcgcgatcaaattttgcaaggaaaagtacgatgacggctgccccgcgaatcagcgcaaggaagcacctgcgttggcgcggaaattcctgctcgcctgcggttacgcggaagaagatctgccacgcatcaccaagatgattgttctgcaccactgctacgacaaaatcgacgacaaggatctgcagcttctcgttgaagccgacctcattgcgggctgcacggaagaagataatccttctgcccacgcaaaagccgtgcggcgactgtttaaatccgcttcgggtctcgccctgctcgacacgtttataaaagaataacgaataatttgacccgccgaggtgtatattccccggcgggtcttgcttcatggttcgttcggtgcggcgcacggcgaccagtttaggtctgcgtttgccacgcggcaatagcgtgtagtttgtgcatagccgccgtctcctgcgcagccactgccgtctttgtttacagccgagacccaatagcgttcgccgtcaaagtaccattcgcgcagtgtgagatcttcgttttgcagcgggactgcacccttttcccagccgttttgggtggaaaagcggtaggcaatgtcgccgaacgcaaacagaaatccgtctgcttttgcggtataactcggcacaaaactggctgtgctttgctcgaaatcggcgacttcagtgcaggtctcgccgtcaattttcacgagtacactgtaaatcggtttttcgcctgcgtcttcgccgaaatcgtatccgtaaaaatacaggtagtcaccctgcacagcgaagctgatgtttctgttcttccagtttgcggtatcaggattttgcaagcacgcagacagatcggcaatatttagaagcgtaccgctttcctcataggtgtgaaccgacaactgcgatgggttttccgcagactgcatgagcacagaaaacccgtgcgcgtttgcgtctgcagcaagaccgagcgctttacatgcgccattttgcgcattgtaaacggtgttcacctcggcggttctggggtcgagaagcaaaatttgcccgcctttttggaggagcaaatgctccccataggcgcagagcgttaagccaattccagtcgttgtatcggttacgcggtagttttcggtgccgattcgctgcatggttttcgcgttcaaatcgaaatcatagagcgcgagttcggcgtctttatcgggcatattccaccagttgccaagcggaatcatgcggtaaacgtggctgccgatgaccgcttctgcgctgtcggtcggctcatagtacatgcggttcaacgttccaagcagcgtttcttcaccgttttttaaatccttgcaatagtacgaaacacgcgtcacgttgccattgtcgttccgcacgcgacggtcgaacaggagcatgtcgccgacaggcgtaatgccgcacgaggacgagaattgccctgtttcatgccccgcggcggtatagagaatcgtctgcgtttcggcttccgtcaccggctttggcggctgcgcacagccggaaagaagcaggcaaagcgaaagcgtgagcgcagcaaaagccttgcgctctttatttcccctgcccatagtatgcgtttgcgccgtgcttgcgcaggtagtgcttatcaagaagctcctgctgcatgggcgggattgtggggtcaagcacgaggttgtgccatgccatgaacgcgagctcctcgaggacgacagcattatgcacagcgttcatggggtctgtaccccatgcgaacgggccatggctgtggacgagcacggcggggatgtcgtccggggacttatccttaaacgtctcgatgatgacggtgccggtctccttttcataagcgccgccgatctcctcaggcgtcattttgcgcgtgcagggaatttcgccgtagaaataatcgccgtgcgtggtgccgagcgccgggataccgcggccggactggctgaacacggtcgcccagcggctgtgcgtgtggacaacgccgccgatgttcgggaatgccttgtagagctcgacatgtgtgggcgtatcggacgacgggttaaggtcgccctccacctttttgcctgtgttcacatcgacgagcaccatgtcctcggggcgcaggaggtcgtactccacgccgctcggcttaatggccaggataccgctttcgcggtcgatgccgctgacgttaccccacgtgaacgtgatgagcttgtatttcggcagcagcatatttgccttgtagacttcttctttcagtttttccagcatgatgttctcctcctgtatccggtcaaatgagtttataaagctttgcgccgtgcggctctattttagcggaaagcgtttttgtgaatgcggtcttctccccactccagatctcctctgcgtgcgttttatcggtgaattccgacagctcggcgctgacaacagcgcggttttccgtgaggttgaaaagcgcgatatacggcgtgctgcctacgaaattgagccacgcggcttttgtttcgtcgcggaaaagctgcaaaggcgtggtgccgttttggttgaggtttaaaagctcgtcatttgtgagcaggctcagcgtgaacgcgtcattatcgcgcatttcgccgcccatgatgagcggcgagcggaaaatgccccacagcgtcatcatggtgatctgctcggcgtgtgtcaggttcgtattgtgccctatgccgtccgccgcgatggtgatatgcccgagcggcagcatatcgcagtccgggaactgaccgggctttacgtgcgcctgccagcgctcgcaccgccagaacatttctttgagggagtcccaattatcccagaaatcgtccgtgatgcgccacatattcgcgtttttcgcaagatgccatgcttcttccagcacagccggaccgggcgaaaggctgagtaccatatcgcgcccgcagcggtcaatggcgcggcggatcatctcaatctcgcggcgcgcggaatacggctcgagcggagtaatcttcacgttgcagatgtcatcgaccttgacgtaatcgacgccccatgaagcgtagagctcaaagatagcgtcgtagtacgcttgtgcgccgtcacgatcagcgtcaacgccgtacatatcggtgttccacgcgcagatggagtttgcgtgagcgatgtcgcggcaagtgacgttcgtgccctttacaggcagggcgcgatgcacggcgagacgcggtacgccgcgcatgatgtggatgccgaatttcagaccgagtgcgtgaatctggtcggcgatgggcttaaagcccgcgccgtttgcggcggaaggaaaacggttttccgccgggatgaggcggccgaatccgtccatgcacagctctgcgaaacggttatactcccagtggcgctgcccggcctccggctcgtaccactgaatatcgcacacgacatactgccaaccgtgcgcttttaagtgctctgccatataacgcgcattgcccaaaagctgcacttcattgacggcggggccgtagcaatcccagctgttccagccaaacggcggctttaaagcgacgcgatcttttttgtaatgcatagtgtatcctccgtaggaaataagctcagtttcattatagcaacttgtctgcacaagtcaagagcaaaaaagagactgcgcaggttttgcacagtcccctttgacttcgtttgaattactttttaagcagctttttgaggcgctccatggcttcctgtgtcttttccagcgtaccgaacgcggtaaggcggaagaagccttcgccgtttttgccgaagccgctgcccggcgtgccgacgacctcggcttcgtttaagagataatcgaagaactcccaggaggtcatgccgtccggcaccttatgccagatgtacggggaattttcgccgccggtgaaccacacgcccatctccttgaacgcatcgaccatgaccttggcgttcgcacggtagtagttgatgacgtccttcacctgctgctggccttcgtccgtgaagacagcctcggcggcgcgctgggtgatgtagttgacgccgttgaactttgtggcctgacggcgcgcccacagcgtattgaccttgatgccgtccgaaacaagctcatcgcagataacggtatagccgcagcgcacaccggtgaagcctgcggtcttcgagaacgagcagaactcgatggcgcactttttcgcgccctcaatttcgaaaatgctgtgcgggagatcgtcatgcgtgatgaacgactcatatgcggcatcaaacaggatgacagcgttgtttttgagcgcgtaatcgacccacgctttgagctgtgctctgttatacacggcgccggtggggttattcggcgagcagagatagataatgtcggccttgacgttttcatccggcataccgaggaagccgttctgctcgtttgcgtcgaggtagatcacctttctgccggacatgacgttcgtatcgacatacacgggatagaccgggtccgggatgaggacggtgttatcgtctgcgaagatatcgacgatattgccgacgtcgctctttgcgccatcgccgacgaaaatctcactgagctttaatgccacgccgcgctttgcgtaataaccctgaatggcttcacgcaggaaatcatagccctgatccggcgaatagccgtggaatgtctccttgtgcgccatttcatccgttgctttgtgcatggcatcgatgacggccggaacgagcggctgagtgacatcgccgatgcccatgcggatgatgtggttatccggatgcgcctccgtataggcggcgactttctttgcaatggtcagaaacaaatagctttcctgaaggtttgcgtagtttgggttgagtttcatgccggtttcttcccttctttttatacttggaccttttttattttcattaccgtctcttatgcgttcttttccctcttattgagtgatgcgccgacaaagccgaggaataacggatgcgccttattcgggcgggacttaaattccgggtggaactgcacgccgatgcagaagtcgttctgcggtacttccacggtctcgacgattctgccgtccggcgaggtgccgctgatgaccatgcctgcttttgtgagtgtctctctgtaatcgttattgaactcatagcggtggcggtggcgttcatcgatatgggaaacgccatagcagcgcgccatttgcgtgccctccgcgatctcgcacgggtagctgccgaggcgcagtgtgccgcccatattgatggtgctggactggtccggcatgaaatcgataaccttattgaggccgtactcgtcgaattcgccggagtttgcatccgcgatgccgcacacgtggcgggcatactcgatgacggcaatctgcataccgaggcaaatgccgaggtacgggacgttgctctctcttgcgtactgtgcggcatagatcataccctcgataccgcggttgccgaagccgcccggcacaaggataccatcgcagcccttgagcatttcggcagcgttttcctgcgtgatgagctcggaatcgatccaattgatttcgaccttcgtgccgtgctcatagccggcatggttgagtgcttcgacgacggaaaggtatgcgtcatgcagtttgatatatttgccgacaaggccgatggtgacggtctttttgcggccgcggatcttctctaccatgcggctccactcggacatatccggctcttttgtcttgaggttcagctcgcggcagacaacgctggaaaaattgtttttctccagcataatcggcgcttcgtacagcaccgggatcgtcatgttttcaataacacagtccggctttacgttgcagaacagggcaatcttgtggaaaatgctcggatcgatcggctcatcgcaacgcaggacaatgatgtccggggagatgcccataccctgcatttcttttacagagtgctgggtcggtttcgacttatgctcgccggagcttttgaggtacggcacaagcgtgacgtgaatgaaaagggagttttccttaccgacctcgagcgaaacctgacgaatggcttcgagaaacggctggctttcgatatcgcctgccgtgccgccgatctcggtgatgacgacgtctgcattcgtcttgtggccgacgctgtaaatgaagttcttgatctcatccgtgatgtgcggaatgacctgaatggtctcgccaaggtactcgccgcggcgttccttgttgaggacgttccagtagaccttgccggtcgtgaggttggagaatttattcaggtcttcgtcgatgaagcgctcgtagtggccgaggtcaaggtcggtctctgcgccgtcctcagtcacgtaaacttcgccgtgctggtacgggctcatggtgcccgggtcaacgttgatgtacgggtcaagcttctgtgcggcgacctttaaccctctcgcctttaaaagacggccaagcgatgccgccgtgatgcccttaccgaggccggaaaccacgccgccggttacgaaaatatactttgtcatagaacttacccctttcttttttacagtgaaacttttatatttttctttgactgagaaacctatttttctccaataccctatttctttttatttaaagccgttttcggcttttttacaattaaatttctacgacgccggtaaaaaccgtgtcggcgctgccggtcatctgcacgccgtcatcggtataatggatgacaaggtcgccgccgcgcagcttgacggtaatatcttcgccctttttgcagtagccgttgagacacgccgcaacggcagacgcacacgcgccggtgccgcacgccatggtttcgccgctgccgcgctcccacacgcgcatttttaaagtgtggttatccagcacctcgatgaattccgtattgatgcgctccgggaacttctcaaagtgctcaaaatgcggaccgctcttctcgaggtcgatcgtatcgggatctttgccgaaaatgacgcagtgcgggttgcccatggaaacgcaggtgacttcgtattctttgtcaaggacggtgatcttctctttgacggcagtatcacccgggaaatcgaccgggatcttcgcgggcacgagctccgctttgcccatatcgaccgtgacagtggtaacttcgccgttttcgacatgcacgcggcagattttgatgccgctttttgtctcgatatgcaaaacgtctttcttcgcgataccgctgtcgtagacatactttgcaacgcagcggatgccgttgccgcacatcatgccctcactgccgtcgaggttatacatgcgcattctcgcgtcggccacatcggacggacaaatgtagatgacaccgtcgccgccgatgccggtgtggcggtcggaaagatagattgcaagctcggcgtagttttgaatatcattttggaagcagtcaatatacacgtaatcatttgcacagccgtgcattttggtaaacgtgatcttctgctttgccccggtgcccggcacgcgcatatagtggtcgatgcccgagccgttttccgcttttttcaggtacttgttcatggaatttcaccgctttctcttgaattttcaccttttatcctcttcaaatttttagaaaaaaattctgattttattcttaaaatgtttttcggcgctccgcaaaaatgcggaacgccgaactatttaacatcaattagacttctacgacaccgtcgaagaccttctctgcgccgccggtcatgagcactttctcatcggtgtagcgcacggtgaggtcgccgccctttaagatgacgcggatgtcctcgcctttttcgcacttgccgttgagcgttgccgcgacaacagccgcgcaagcacctgtaccgcaggccatcgtttcgccgctgccgcgctcccaaacgcgtaccttaagagtgcgctcgtccacgacctcgatgaactcgacgttgacgcgctccgggaagagcgggttatactcgaacttcgggcccatggcattgagatccagcttatcgatggacggtgcgaacaccgcacagtgcgggttgcccatggatgcgcaggtgatgtaatactcgtgaccgtcgatgatgacgggcttgttgacgaccatgtcgccttcgagctttacgggcacctgctccgggcgaagcgctgccgcgcccatatcgaccgtaatcttatacgccttgccgttcatcgtcatgatgctgcaagacttgatgccgctctttgtctcgatattgatgacaggctttttcacgatgccgttgtcgaagaggtactttgcgacgcagcggatgccgttgccgcacatgagaccctcgctgccgtcgcggttgaacatacgcatctgagcgtctgccacatcggacgggcagatgaggatgacaccgtcgccgccgacgccgttgtggcggtcggacaggtagatggagagaaactccggagaggaaacttcgttttcgaagcagttgatataaatgtagtcgttgctgcacgccgacatcttggtgaacggcagcttgaccttttcttttttgaggttgttgatgtccacaatctccgtgttgtacggggtgtagcggctcatcaggctgtccgcgagggcgtttgcggtatcgatggccgtgaggcacgggatgccgagcagcgccgcttttctgcggatcttaacgctgtcgcgtgcggggtttctgccctttgcggaggtggagatgatatacgccagcttaccgctttcaagcagcgtaatggtgttgaccgggctttcgtgaatcttatcgacgatcttcacggtgaggccgagctttgcaagcacgcttgcggtgcccgtcgtggcgtaaagcgggaagcccattttgtcgaatttcttcgcgatctcgccgatctctttcttatcgccgtcgcggacggtgatgaacacgccgccctttttgttcatcttgctgccggaggcgatgaggcccttatagagcgcctcctcaaggttgttgccgatgccgagcacttcgccggtggatttcatttccgggccaagctgggtatcgacatccgtgagcttctcgaaggagaagaccggcaccttgacggccgtatacggcgaagtcggatagaggcccgtgccgtagccgaggtcggtgagcttcatgccgaggctgacctttgtagcgaggtcgcacataggcacgcccgtgaccttgctgaggtacggaaccgttctcgaagcacgcgggttgacctcgatgacgtaaatttcgcggttcatgatgatgtactgcaggttgatgaggccgatggccttgagctccgtgcagagcatttcggtcgtcttgacaatctttgcgctgagctcgtcgtcgatgtcctttgccgggtagaccgcgatgctgtcgccggagtggatgccggtgcgctctacgtgctccatgatgcccgggatgaggatgttctcgccgtcgcagatggcgtcgacttcaatctcggttccactgaggtacttatcgatgagcaccgggttatcctgcttctggcgcaggataatcgccatgtattcgttgatgtcttcatcgccgtatgcaatgatcatgttctgaccgccgagcacgtaggacggacgcatgagcaccggatagccgaggtcgtgtgcggctgcgagggcttcctccgtcgtcatgacggtgtgacccttcgggcgcttgatgttgcagcgctcgagcagttcttcaaagcgctctctgtcctctgcggcatcgatgctgtcggcgctcgtgccgatgattggcacgttgtttttcgcaagcgtctttgtaagcttgatggccgtctggccgccgaacgcgacgacaacgcccttcggcttttcgatgttgatgatattcataacgtcttcggcgcacagcggctcaaagtagagtcggtctgcagtgtcgaagtctgtggaaacggtttccgggttgttgttgacgatgacgacttcatagccgaggcgctggagagactccacgcaatggacgctggcatagtcgaactcgataccctgaccgatacggatcgggccggaaccgaaaaccatgacggtctctttgccgcttttgccgatgaactccatcgcttcgttttcaccgccctgctccggcgtatcgtaggtgccgtagaagtacggtgtggtcgcagcgaactcgcctgcgcaggtatcgaccatcttgaaggtcgcttcgtgacggaaggtcggctttgtgccgcaaatacgcgtgagggcttcgtccgtgtagccgagtttcttgccgcgcgtatactgtgcgtgcgtgagcggctgatccttaatctcgcgctcatacgcgagcaggttattgagcttttcgaggaaccacatgtcgatcatcgtgaagtcgtggatctctttggtggtgacgccgcgcttcatgagctcgtagatgacgaacaggcgctcgtccgtcgcgtcttttaaaatctgccacagggcactgtcctcgtagtttgcgaacttcggcatgttgagcgtatcgagcgagatttctgcaccgcgcacagccttcatgagggccatttcaaacgtatcggcgatggacatgacctcgccggttgccttcatctgcgtgccgaggttgcgctttgcgtagacgaatttatcgaacggccacttcgggaacttgaccgccacatagtcgagcgcaggctcaaatgctgcgtaggtcttgccggtgacggcgttgacgatctcatcgagtgtgtagccgatggcaatcttcgtcgcgacctttgcaatcggatagccggtcgccttagatgccagtgcggaggaacgggacacacgcgggttgacctcaatgacagcgtactcaaaggacgtcgggtgcagcgcgaactggcagttgcagccgccctctacgccgagcgcgtcgatgatgttgatggccgcagtgcggagcatctgatattctttatcggaaagcgtgaccgccggggcgatgacaatgctgtcgccggtgtggacgccgaccgggtcgaagttttccatggagcagaccgtgatgacgttgcccttgctgtcgcgaataacctcgaactcgatctccttccagcccgcaatgctcttttcaacgaggatctgggtgatcggcgagagcgcaaggccgtttgccgcgacctccatgagctcttcgcggttatcgacgataccgccgccggtgccgccgagcgtgaacgccgggcggatgataacggggtacgtgatctcttccgcaaactccagtgcatcctctaccgtggtgacgaccttggacgggatgcacggctgaccgatgctttccatcgtatccttgaacatctgacggtcttccgccttatcgatggtctccggggaagcgccgagcaggcgtacgttgtgttccttcaaaaagccttcctttgcaagctgcatggaaagcgtgaggccggtctggccgccgaagccggagaggatgctgtccggcttttctttttcgatgatgcgcttgatggtgggcagcgtaagcggctcgatgtaaatgtggtccgccatggcgttatccgtcatgatggtcgccgggttggagttgacgagcacgatctcgatgccgtccgctttcagagcacggcacgcctgagtgccggcgtagtcgaattccgccgcctgaccgatgacgatcgggccggagccgatgacgagaacctttttaatgtctttattcaatggcatagctgtaaacaatcctttctatactgctttgggtactgtctattttcccatcatctcaaagaatttatcaaagaggaacgcggtatcgcgcgggccgccgcaggcttccgggtggaactgcacggaaaaagcggggatttttttatagcgcacgccctcgcacgttctgtcgtttacgttgttgaaatattcgtcggcgatctcggggtcgattgtggaggacacgaccgcgtagccatggttctggctggagatgtagacgcggccggtctcaagattttgcaccggctggtttgcgccgcggtgaccgtacttgagcttttcggtcttaaagccgtttgcaagcgccagcagctggtgaccgaggcagatgccgaagagcggtttgcccatgttcataatcttcttgaggttttcaatgacctcgatgttatccgccgggtcgccggggccgtttgaaagcatcacgccgtcaatgttaagagcctttaactcgtctgccgtcgtgttgtacgggcatacaatgacctctgccccgcgcttttcgagctcgcggcggatgttctccttgtagccgtaatccatgagcgccacggtgcatgttttctccgggttctcacggcgcgtcatctcggtgacggaggtgctttccaccgcgtttgtcacgcggtagctgtgaatcttatccatatcgacatgcgtaagctctgttgtgatcataccgttcatgacgccgctttcgcggatgacctttgtgagggcacgtgtatcaatgccgcaaaggccgatgacgcctctttctttaaaaaaggtgtcaagatcaccctccgagcggaaattggagggcgactgacaccattcttttacgatataaccacagggaccgatgatctttccctcaaaatcggaggggatcacgccgtaattgccgatgagcggaaatgtctggacgacaatctgcccgaaatagctcttatcggtgagcgtttcgagataacctgtcatgccggtcgtgaaaacgacctcagccgttacttcgcccgccgcgccgaaggattcgccgcagaagacctttccgttttcgagtaccaaatatgctttgttgcccataacgtacgttcctctttccctgaaataattactcttttctgctgtatgcaatctatgtcaaagctgcggtgcagccctgtacgcattcatttacgtataggttttcaggatattttccgcaacatcctttttcgatgtgcgcatatccatcgcctgtttttcaatatagcggtgcgcctgctgctcgctcatgcgcaggtattccacaaggatacactttgcacgcgccacaatgcgcacttcttccattttggttctgagcttctggttttcccggtcaaagcgctgccagcggttctgcgtagcgatgagcaggtgaagcgcctgataaaacagcgggcgcgaaagcggcttttgcaccgtcaatatgccaaacggctccattttgtcgttcacctgatcgaaaagctccgcttttgcaatgaccatgacaccggaaacgaatttttctgtgatatactctgccagctcgtgcccgaattcatccgggagcggtgtgttgataaccacaaggtcgtagctgcgccgcaaaagcagccgccgggcatctccgccgctgagcgccgttgtcatgggcgcaaactcgcgcggggaaagcagctctgtgatatacgccgcacctttttgcgtgccggacacgatgaggacgctgtgctgaatgatcgcattcatgccctgtgcccccttgttttacacatctgcgggcccgttgccgaacgtgcggatatacgtctttacgaaatactccgggaacacgttgcggacaaagctgctctttgcgaaaatttgcagcgcttcttcggcagacttcggcagcttgccgcaggtctcgcgcgcaagatcgggctttggcagcttcgtctttttgaggtagccgtcaagccccgcataaatgagcacagcgtacgcaaggtacggattcgcagtggaatcgggtgagcgcacctctattgtgctgctgccttcctttttatacgcaaagcaccagcggctcttctccgaccaagagatgaactccggcgcaccgaacgcaccgaggcgtttataggaatccgccgtggggttcaaaatggcggtaatttctgcggcgtgctccagaatacctgcaaggaaatactcggaacagtcgcccatctgcatgcgcggcgttagcgtgatgtggaagccgttgccgtccttacccggaatggggttcggcgcaaacgacgccgtaaggccgtttctcgacgccatggtcttcacaacagacttatacgtaacgacatcgtctgcggactgaatggcagagctgtgctgaaaatcgatgatgttctgccccgggccgccgctgtggtgcgagctttccggtgtgacacccatatcctcgagtgtcaggcagatctcgcggcgtacgtcctcgcccttatcctccggcgcggcatccataaagcccgcgttgtcaaaggggatagccgttgcattgccgttttcatcgttcttgaaaaggtagaattcgtttcttgccccaaattcaaatattataccatgaagttttgcaatgtcaaccgcttttttcaggatgccgcggcagtcgatgtcgaagccggtgccgtccgaacggcgaatgtcgcagaaaaagcgcacgacgcgcccgtgtgcgggccgccacggcagaagcgacatggtggatgtatccggcaccaaaaagagctcgctgtccgcctctttttcaaagcccatgatgcgcgaagcatcaatgggaataccgccctcgaacgcagaagccaaaaggctcggctgaatggcgatgatcttctgtctgccgaaaatatcgcagaacgccattttgatgaacttaacgtcgttatctgtgataaactctgtgacctcggactccgtatactgcatgccgaacccttcctttcttttttaaaagcgcgtttcaaacatacaaatacgcgtgaaatccggtgttgccgtctttcacgctgtacctgttcttcttttctgccgcattttgagatattctgccaaaatacagcgtatgctgaccgcttttgaatattataacacaagatcggtgtattttgcaataagacagaacgcacaatgtttatcgtcaaaatacaccgtcgatttatgcaagaaaagaaaccttaatttgcagagaattgcaggggcaaaatcagttcgtcacatagagctgcttatacggattctgtgtgttcgggcgcagcacgtagtattcgtcgcgcagaagactttcggcatctgcaccgaacttttccgcgtagttttgaatgagcggcgccgcaatctgcatgtcttcttcggtcgccttatgcgccacgacctgctccggcaaatccttcggcaggtgcgcggtgcgcagataaatgcgtccgccgtgcatgcccgtgccgcagaaattgccgaccggctggcgatcttcactgccgatgccgagcacaacgatgatgccgcccgcctgatactcgccgaggaagctgcctgttctgccgccgacgacgagcacgggtactttctctttatactctttcatgtggatacctgcgcggtaaccggcatcgccctgcacgtagatggcaccgccgcgcatggcgtaacctgccgcgtcgcccgtgctgccgtgaatggtgatctcacccgcgttcatcgtgtcgccggtcgcgtcctgtgcgctgcaatttacaataatatttgcgccgtccagatacgcgccgagcgcgttgcccggcacttcgttcaatataatcgtaccctcactttgccctgcgccgatatagcgctggccgagtgcatatgttttctgttccatgtttctcccccttactgctgctttgagagcaggtcgcggcgcgtacgggccgtgaatgccatgagctgcggcttttcgcagatcagcttaaaatcgattgagcttaacggcgtgcgattacggataagcgccgtgtagataccggcacgcgccacgtcgccaatcaggatatagccctttaaaacatcatctttatagaaaaggatcttgtagttttcgccgtcacggtggacgtaggtctcgccgtcatacgtgcctgcggtgatgatgtgcagccccatgaagccgatggcattcatcgggatcgcccggtcaaagctcgctttgccgcccgccatgttgatgccggcggtattgccctgcatataggcgttcggcaacagcgccagcacacggttcacgccggcagaaatatcgaagctctccgcgcagtcgcctgcggcgtagacatcgggcagtgttgttttgccggtatcatccgtcgcaatgccgcggcgcacctcgccgcctgcatctttgacgagcgaagtattcgggcgcacgccgaccgcaatgacgagcacgtcaaaatcgaccgtaagaccgcttttgagtgtggcagtcgtgcccgcaaactttgcggcggtatcgccgaggtggaactcgatgccctgcttttcaagaaaatctttgacgatagcggagccggtctcatcgaggatgctcggcagcacgcggtcggcaaggtcgacgaccgtgatggatttcacgcgctctttgatgccctctgcgcactttaaaccgatgaggcccgcaccgataatcaaaacgcggctgtcttttgtaaggacgctttcaagtgcgtgtgcgtcatcgagcgacatgaacgtgaacttttcaggaacggtatcaagcccctccatgggcggtacgaacggcgtggagcctgttgcgacaaggagcttttcatagggtatctcttccccgctttttaatgttacggttttcttttccgggtcgagctttgtgacggtctcaccaagctttgcggtgacgtgattttcttcgtaaaagctgtccgggcggtatttcatgcgctcctcatccgttttgccctgcaataaataggaaatgagcgggcgcgcgtaggtgtggtggttttcggaagcaatcagcacgatctctccgtctttatctttactgcggatgccttccacgcagccgatggccgcagtggagttgccgatgattacatattttgccatggtgctcagtccctttcctcaaagatgatggctttgttcggacagccctgcacacaggcgggcttaccgccggcgttttcaatgcatagctcgcacttctgcatgacgccggattccgagggcatcagcgcgccgtagggacataccagcacgcaggtgtggcagccgacgcacttattctggtcgatacagaccacgccgtcctttttggaaagtgcgcccgcaatgcagcttttcacgcacagtgggtctgtgcagtggcggcaggaaaccgcaaagctgacctgattgtccccctcaatgcggatgcgggggtgaatagtcctgtccttcagcgccttgatcatgctggattttccggagtttgcaaaggcgcagtaatattcgcaaagatggcagccgaggcaccatttttcatcaacatatactcttttcatggttacgctcccttttctgcttattcgcccgcgtgcttgatgccgagaatctgaagctctttttcgttcagacccacgccgcgcagcataaggcggttgccgcgcagcgcctcgatggaattgatgcccatgccgcccatcatttctttaatctcgtgctcccacgcggtgacaaggttcacaaggcgcttatagccgatgtccgggttaaggcgcttcacaaggtcggggcgctgggttgcgatgccccagttgcacttgccggtctggcagcttctgcacagatggcagccgagcgccaaaagtgccgccgtgccgatgtagcacgcatctgcaccgagcgcgatggccttgacaacatcggcgctggagcgaatggagccgccgacgacgagcgaaaccttgttgcggatgccctcatcgcgcaggcgctgatcgaccgccgccagagcaagctcaatcgggatgccgacgttatcgcggatgcgcgtaggcgctgcgcccgtgccgccgcggaaaccgtcgatggcgatgatgtccgcgccgctgcgtgcaatgccggacgcaatggctgcaacgttgtgcaccgccgcaatcttgacgatgacgggctttttgtagtttgaggcttcttttaaggagaaaacaagctgacgcaggtcttcaatggagtaaatatcgtggtgcggtgcgggcgaaatggcgtccgagccctccgggatcatacgcgtgcgggaaacgtcgccgacaatttttgcacccggcaaatgaccgccgatgcccggttttgcgccctgccccattttgatctcgatggcggcgccggcgctgaggtaatccttatgcacgccgaaacggccggacgcgacctgcacgatggtatttgcgccgtacttgtagaaatcctgatgcagaccgccctcgccggtgttgtagtagatgccgagcgcttctgcggcgcgggcaaggctttcgtgcgcattgtagctaatggagccgtaggacatggcggagaacatgatcggcacggaaagctcaagctgcggggtgatattcgtcttaatcttaccgttctcgtcgcgctcgattttagacggcttctgacctaaaaacgtcttcgtttccatcggctcacggagcgggtcgatggacgggtttgtgacctgcgacgcgttgatgaggattttatcccagtagaccggcaagggcttcgggttgcccatggaagacagcagcacaccgccgctgcttgcctgacggtagacctccatgatggtctcgccggaccagttggcattttccttaaaggtgtggtcggtcttgacgatcttcaaggcgcgcgtgggacagatggaaacgcaacggtggcagttcacacagcggctttcgtcggagatcatcattttcagctcatcgtcgtaagcatgtacttcgttggagcactgtcgttcacaggcacggcaggcaatgcagcgcgcggggttgcggacgacctcgtactgcggatataaaaaatcgatagccatttatagtaacctcatttctcagagaacacaaactcttactttttgtccagcgtgaagatgacaggctcgccgcctgcgggtgcccagaccttatcgagcgtgggctgaatgacgcggatggcggattcttcactggcgatgtagaccatatcgcccttttcgccgacgaccatagaacgcaactttaagcggtcgttgagtgccataaggccacccgtaaagccgaccagaatggagaacggaccggtgacgagcaggccggaatacacattgcgcaaatacgtcagacgctcgcgctcctccgggcctttgttctgaatggtcgtccagaacggtgccgcgatgacgtttgcgacctcttgcagggtgaggccctgacggcgtacaagataatcgaaaatataggtgatgacctcggtatcggtcaaaaggttgcagttgtagccgtacatctcaatgcagcggcggttcgcatcgtaggacgagatttcgccgttatggacaacggaaaggtcgagcagcgcaaacgggtgcgcaccgccccaccagccgggggtattcgtcgggtagcggccgtgcgccgtccaacagtagccggcgtattcatcgagacgatagaaccgaccgacatcctccgggtagccgacggccttaaacacgcccatgttcttgccgctggagaaaatatacgcgccatcgataaaggtattgacgcggttgacgcagcgggcggtgaactcgtcttcatcgagctggctttccgcaagctttgtgtgcagcggtgtgacgaagtaccgccagataagcggctcgtccgtgatctgcggaatcttgcggatcggaattttggaaaggttcacgacgtcgaaatgctcgttgatgaacttctcacattcctcttttgcttttacattattatagaaaacgtggaacgcatactgttccgcatattccgggtaaatgccgtagccggcgaagccgccgccaaggccgtttgaacggtcgtgcatgatctcaatggagcggatgatatcggagccgtccagccgctttccgctgcgggaaaaaacggaggatacggcgcaccccgaaggaattcggaaatcgcccgctgtgcttttgccttctctaagcatgaagactgctcccttctgaaaacaaataagatatacgtctttttcccggctttcccgaaaaaaagagaaagtctgaccatacatgctgcgtgcaatgcacgcgcgccgttcccccggcgcaatctaaaagccccacattcggcagcttttaaaagcaacatgtatgatcagactccattgtctgcctaccattatatagcggcccttcttatatgtcaagaaaaatttcgtgatttttgaattttcgagttgtagcaatttcattttatgttcgcctgactttaaaaatttcataaaatgaatttatgaacgcaggtttaaattatacatcctgcaaatcttcaaattttctcaaaaaaggtgttgacaaatggcccgagacgttgtaaaattcatcacatagcatagcaaaggcgctgtggttggtttattgccatccccagcgcttttttgtttgaatgaattacgaacagctgtgcagacggtttcgtaaagcgaagccgcaggacgaaacgcacgggaagatatacaaattatatcgcagcgttcgcccctcctattatgcgaatcttattgaaggaaagagtggtttacatgagcagcacgacaaagatcaatgtgccggacattttcgccagcatggtgtttaacgacgacgtcatgcgtgagagactgccgaaggacgtttacaagtctttgagaaagaccatcgacaacggcaaggacctcgacatcacggttgccaatgctgtggcaaatgccatgaaggactgggcgatcgaaaaaggtgcaacgcactacacgcactggttccagccgatgaccggcatcaccgccgagaagcacgacagcttcatttctccgacggcagacggccgcatcatcatggaattctccggcaaagagctcatcaagggcgagccggatgcttcctccttcccttccggcggtctgcgcgcaacatttgaagcccgcggctacaccgcatgggacccgacctcctacgcattcattaaagatcactccctgttcattcctacggcgttctgttcctacggcggcgaggtgctggataagaaaaccccgctgctgcgctccatggaagcgttgagcgcacaggccgttcgtattctccgccttttcggcgactccacaacaaagcgtgtcatcacgaccgtcggcccggagcaggaatatttccttgtcgataaaaagctctacgatgagcgcccggacctcatttacacgggccgcacgctgttcggtgcacgcgcgccgaagggccaggaacttgaagatcattacttcggcgcgatcaagccgagaattgccgcgttcatgcaggagctcgacgaagagctgtggaagctcggcgtgcttgcaaagacaaagcacaacgaggtcgccccggcacagcacgagttggcgccgatcttctccaccacgaacgttgcgaccgaccacaaccagctgaccatggagacaatgaagaatgttgcgctccgccacggccttgtctgcctgctgcatgaaaagccgtttgcaggcgtgaacggctccggcaagcacaacaactggtctatttccaccgataccggaaagaacctgttggagccgggcaagctgccgcaggaaaacgcacagttcctcctcttcctcgctgctgtcatcaagggtgttgacgagtatcaggatctgctccgtatctccgtcgcttccgcaggcaacgaccatcgtctcggcgcaaacgaagcgccgccggccatcatctccatcttcctcggcgacgaacttacggctattctgcacgccattgagaccggcacggtctatggcggtacgctccgcgtcaacatggagattggcgtaaacgttctgccgtccttcacaaaggatacaacggacagaaacagaacctccccgttcgctttcaccggcaacaagttcgagttcagaagcctcggctcgcagctcaacatcgcctgcccgaacatcatgctgaacacgatcatcgccgatgagctcgagcagtttgcagatgagcttgagggcaaggaagattttaacggcgcactcaacgcactcatcaagcgcgtgatcaaagagcacaagcgcatcatcttcaacggcgacggctatgcggacgcatggaaggcggaagctgcaaaacgcagcctgacgaacctgccgaccacggtagacgcactgccgcactacaccgacgaaaagaacgtgaagctctttacaaagcataagatctacaccgaggtcgaaatgcagtccagacaggacatcatcctcgagacgtacgcgaagaccatcaacatcgaagcgctcaccgcaagtgatatggtcaagcgcgacattctccccgctgtttcctcttacgttgcggagcttgcaagcggcgttgccacgaagaaggccatcagcgatgacattccgtgcgaagcggagcttgatatcatcaagcgtctttccggcctgcaggactgcgcatataagaagctcgctgcgctcgataacgccatcatcggcgtgaaggaagtcggcgaagatccgattgaggttgcgacctattataaggattccgtcatcaccgccatgaccgagctgagagccgttgtggacgagatggaaacgctggtttcttccgattattggccgtacccgagctacggcgatctgatgttcagagtataaagggctttgaacataccgtttcaaacggataaggaatgaaaaattcaatataggcacaagggtgtgcacggggttccgtttcaggaaccaaacgtgcacacccttttctattttcaaacaacacataggaggacgaacatatgacaagcgaaatcttcagcgtctggtttttgatgggcgcagcgctggtcttctggatgcaggccggcttcgccatggtagaaacgggtttcacccgtgcaaaaaatgccggcaacattttgatgaagaacctgatggacttctgcatcggcaccggcgtattcattctcatcggcttcagctttttgctgggcgaagacttactgggcttcatcggtaagccgggctttgatattttcacaagctacgcaaactttgactggtcgaatttcgtattcaaccttgtgttctgtgccacgaccgcgaccatcgtttccggcgcaatggcagaacgcacaaagttcctttcctactgcatttactccggtgttatctccgctttggtataccccatcgaagcacactggatctggggcggtggctggctttcgcagctcggcttccatgattttgcaggctcctgcgccatccacatggtaggcggtttttccgcgctcatcggcgcaaagctgctcggcccgcgcatcggcaagttcgaaaaggatgcaagcggcaagatcgtaaaggtcaatgctttcccgggccacaacattccgctcggctgccttggcgtgttcattctttggttcggctggtacggcttcaacggtgctgcggcaacaagcgttgagcagctcggctccatcttcctcaccaccaccgtctcacctgctatagcaaccgtcacctgcatgatcttcacatggataaagtacggcaagccggatgtttccatgtgtctcaacgcttctctcgccggtctggtcgccatcaccgccggctgtgacgtaacggactgcctcggcgcagcaatcatcggcattgtggccggtctcctttgcccgttcggcgtttggctgctcgactataagctccatgtcgatgacccggtcggcgcggttgccgtccacttctgtaacggcatttggggcaccattgcagtcggtctttttgcaacgaccacagcccccggcaacgatagcttcaccggcctgttctacggcggcggcattgcactgcttgcaaaacaattgcttggtgcgcttacggtctgcgcttggacagccgtgacgattaccattgtgttcctgctcatccgcgcgacggtcggcctgcgtgtgacgagagaagaagaaattatgggtcttgacctgcccgagcatggtcttgcaaatgcgtatgcagacttcgttccggccatcaacacctcgctcgaaagcgcagacctcagcgttgcccctgccccgttcggcccggctgcggtagacgaagcagtgccggtcgttgtgcatcacgcccccgtgaagaccgccaaggcggaaagcaccggcgtgaagatgacgaaggtcgagattgtgtgcaagcaggcagctttcgataccttgaagaacgcactgatgagcgtcggtatcaccggtatgacggtgacgaacgtactcggctgcggcattcagaagggcaagccggaatactaccgcggcacgctcgtagaagcaaacctgctgcctaaggtacaggtggaggtcgtcatttccaaggtgcctgtccgcacggtcatagaaacagcgaagaaagcgctttacaccggtcacatcggtgacggcaaaatcttcgtttacgatgtggagaatgtcatcaaagtccgtacaggcgaagaaggctacgacgccctgcaggatgtggaataataaatcttcccatttaaattgagtacgacgcgtactacgctcctgaaataagaaaagccgagacctgccggttccccccggcgggtcttgactttttctgtcattttctcctgcaacttattttcgattttgcacaaaatgggaattgaactctttttggatttgtgttatactgttataagaatttatccaccccgattgtgagaggagacagccgtgaaaattcaggaatccgcagaaaactatcttgagaccattttgatcttatccgagcgcagcacctatgtgcgttctattgatattgccaacgagctcaattttacaaaacccagtgtcagcgtagccatgaaaaagctgcgcgagaacaatttgatcaccgtagacggcgacggctacattcacctgacggaggacggccttgccatcgccaaccgtatgtatgagcgccacaagttgctttccgattggctcacctatctcggcgtgccgaaggacattgcaacagaggacgcctgccgcattgagcacgtcatcagccaggagagctttgaaaagatccgcgcgcatgtccgcgaaatgaacgagcatctttaatgaactcaaacagcgcaaaacccgtttccgaagcttttatcggaaacgggtttttacttttacagcaacgccatgctctgcaaaataaagatcatcaaaaatacagtcgggatgcagcacacagcgctcaaaacaacaagctgaccggcaagctcgccatctgcgcccgcctgctgcgccatgatgtagcttgataccgcgaccggcgtttcccacgcaagtgcaagcgccagaaggctcggccctctgctgcccgccagaaccgcaatcggcagaaaaacaagcggaatgacgacgagctttataaacaccgtcacgcccgcaatacgcatgttgccttttagcttgcggaagctgaaatcaccgccgagcacgatgagtgcaagcggtgtggcaaggcgcgaaacatcgcgcaggctcgtttccagaaatgccgggaaacgcaatttaatgatggacgcaaacacaccgagcagtgccgcgataatgagcgggtttgtcgcgatggatttgagcgtctttttcagcgagaccttacctccgcccgtaaataccgtcagcgcaatgacggccaaaacgttgtacatcggcacgagcacggcgctcaagatggatgccgcggcagcctcctccgcgccgaacacgttcgtgacgaggctcacgccgaatatgacgtagttgctgcgaaaaagtccctgaatgatgacgccgcgctgtttcggctcgcgcacgacacgcggcacgacgatgcacagcactgcaaacaagaacagcaggctccctaccgcgattgtgaacgtcatgccgtcgatggcctcggtgatctccgttttatagatgttattaaacagcagaaacggcaggaaaaatttgaatgtcagcgtattcgtctgctttaaaaattccgacgagacgaagtttttgtgctttaaaaagtagccgaacgccaaaagcaaaaacgttggcatgatcgcattcagcgcgactaggaaactatcgaacacgctgcaccccggctttcacactttcatgcaccgccataattttctggaagcccgcgatgccgacggaaaacgccgttgcgccgcccgccgccgtgcccatggcgagcgcctttgcaaaatcgccggaacgcgtgaattccgccaaaaagccgccgaccatggaatcacccgcgccggtggagtttatcagcgtgccctttgccgccggggcaaaatacacctcgcccgtttccgtatacaaaagcgcaccgtcgcccgccatggaaacgagcacgttttttgcgccgcgttttttcagctcctccgcaagcgccgtcacctgttcctctgtgtccgccggggcacggaacatctcggaaagctcctcgcggttcggctttacgagaaacggctgaaattcaagcgtagacaataataaatcgcctgcggcatccacaatgagccgtacgccttttgtttgcgcaagctttgcaatctgtgcgtaaatgtcttttggcagtgacttcggcacactgccggaaagcaccaaggtatcctgcggggtcaaggcaccgagcttttcaaaaaaatttttgagctcgttttctgaaatctccggaccgctgccgttcagttccgtttcttcctcggcatgcagctttaaattgatgcgcgtaaagccgttttcgacttcgatgaaatcggtcgtgatgccttctttttcaacgccctcgcgcagcgctttgcccgtaaaacccgcaataaacccaagcgcgatgctttttgtattcaacgcgtgcagcagcaaagagacgttcacgcccttgccgccaaacacaatgttttccgttttcgtgcggttcgttttgcccgtacggaacgtgtccgccgtgacgacgtaatccaccgccggattaaatgtgatcgtatagatcataaaaccccctccaaccaaatcaagtggtttcagcatagcatgatttcacaaaaaaagcaagaaaaagcgtctgcaccgccaaaagacgtatgcagacgctcgattttattttgatttaggcttctaagcgctcaaattttttcgcgccccagtgcaccaaaagcagatgcatcaagacagacgcaagcaaaaggaacgcagtcgttaccgcatacgctgcaatgcccggaatatgcagtgcagataccgcgaaaaacacgccgacgatcaccgccgcaaagaagtacgcgccgaacattgtgacgcatacgctgagggactgcttgcacggctgattttcgctctgccagtcaaagcgcggcgcgagcaggttcatcacaaggccgagcgtaccaacgaaccagcagaacaaaacgcaaacgcaaacggtcagcaccgtaagcccgataccgcacccggcgatgaggcaaagcgccaaagcactgacggcaacaagcggcatttgcaggcggcacaccataaggagcttgcccaaaagcaccgttttgccgcttatgggcatcgtgcgcagcacccacagatttttgccctccaacgagacagacggcgcggtcgcgcaggacgtcgcgatgcaaaacgccatcacgccaaaaatgccgagcgcaatccactcgggccgaaaactcatcaggcttatcatctgcatcagcttcccgcggaaaatcgcggcggcaatcggcaaaaccggaatgaccaccaggccgaagccgaaattcatcaggtacgcggggcttgtgaagaacttccgctgctccttatgcgcaacagacagcaccggcgtgcgctgctttgcggaagctttgcccgatttgtgctttgcacccgctttcgcgcccgatgtacgcacggaggaaatgaaagatgcggaaagccgccaaagcgtgaaaagcgctattgccacgctcaataaagtcacgagcagcgtgtgcaaaaggcttccgccgcacgccatgccaatagcataaagcggccaaacgtatttcatcgcacccgcgatctgcgtgccctgcatgacgatcccggacaaaaacgagttgacgttcgcgtaaaaataccagtacaccgccatgaagatgaccatgtacaaaagcgaaacaaccgccttgttgcgcaggcggctgaggagcttgtgcagcacccagccgagcgcacagcagacagactgcgaaatcaggctcagagccacaaatgtaaacagccacccgataatcctcgtcgccgatgcaccgtaggaaaacgcgtaaataccgaacgcgggcagcaaaaccgccagcgtgtaccctgccgtcgttgtgaacagcactgcaatgcgcgtcaagagaatgtactttggcggtatcggcatggaaagcaaccgttcgttgtctttcgcgtcatacaactgcgcctgcgtcataaaaacgctgcccagcatggaaagcgccagcgccgctgtgcccgccatggcaaaatacagccatgtaagccccatttcgcacaacggaacaagctctgcgaacaccacaaacatcaaaatttccatgcacaccacaaagaacagcatcagaaaagccaaccatccgccggaggtctttttgccgttgccttttttcatgcgcgccgcaaactgcttccattgcagcttccagagggatcttaacatgcagcctccccctttcagtccttgtggtcttccagctctaagaagacctgctccaaagaaccgtcgccgcgcacgctgtccatggtgccgtgtgcaatgagcttgccgtttttaataatggccacattgtcgcacagcttctccgccacctccaaaacatgtgtggaaaagaagatagcgccgccgtttcggcaatgctccgccataatctcctttaattcgtgcgccgcaatggggtcgagcccgacgaacggctcgtccatcaaaatgagcttcggctcgtggataagcgcgccgataacggcgattttctgcttcatgccgtgcgagcactccgagatgaggttcggcagcgcgtttttaatatccagccgctcggcaagcgcttccatgcgcgccttgcggtccgtttccgatacgccgtacatatccgcaacaaaattcaaatactcgtagcccgtcaggaattcatatagatcaggattatcgggtatgtaggccatgatctttttgcaggcgatggggtctttttgaatgtcgatgccgttcaccgtaatggtgccgccgtccggctttaataagccgcagcaggctttcaacgtagtcgttttgcccgcgccgttgtgtccgatgaacgcgcaaatctcccccgccgcaatgtgcagcgaaaggtcgtctacggcgattttgtcaccgaagcgcttggtgtagttttgaatgttcagcatgtgttttttctcctttttcttctttttcacggctgaaatgcggcctttccgaatttcagccgccgagcccattatagacacacggcagaaaaatgtcaatgttttccggcgcatgggaatatgtcataaaagaacataaaaacagcgcagctcctacgagctgcgccgaagcgagtcgaattattcttttcctgcagagagcgccgcttcctgctttctgcggcaaccaaacacgagctgatcgataacgacgacgagcgcgccgagcagcacgatgatgtaataggtgaagaatcgccagacaagcaccgcggtgtacaaaatatcgccggatgcaaaatacgatttaaagaacatggagaagccgagctcctgtgcgccggatgcaccgggcagcgggataaagcacacggaggcctgcagcatcgtctgcatacaaagcagttcgccgtaaggcaggtcgagtgaaaacgcgcggaacaccacgtacagcacgctcatctgcaaaatgacctgcgggatcgaccacaaaatcgcaaggagcacatagcgcattttgcttctgaatttcattgtgtaggaggagaaatccgcctcaaagccgtgcactttttctatgtaattctcgcgctttttgagaaacgtacatttcaagagcagctttgtcacgccgccgcacagcttttttaaaatcttcgggctgaacagaagcggtatcgcgataatccacagcccgttgatggcgatgccgagcagcacaatgggaatgagctgcgggtcgtcccgcttcaaactcgggtacatatagatcagcgatgccaccgtgcacagcacaaacgcaagctgatacgcaaaaaactttacaaacagcaccgcagtggagttgccgaccgagaccttatcgcgccgcaggtagacgacctgcgcaggctgcccgcccgtggagctcggcgtaatgtaagaataataaatgccgatgagcccaatcttcaccgttgtccaaaagccgacgtgctcaccctgcgcgcgcagcagcatatggatgatgccgccctctgttacgaggaacacgccggtcatcagcacggcgagcgccacaaacccgagggaaagatttgcgatgacggaaaacatgcccgcaaattcggtattgacgagcccgaacacgatcatcacgaccaccgtcagccccacgtatataagaccccacgggatctttttcttttctttcatgaaaatgtagtctccttgcagaaaaatcgtattttatagtataccatatagcgtttctattggcaagacaagactgacaaccgaaagaaaacgttaaggcagtgccctgaatattcggcactgccttattcgtttattttatttttccccgtgcgcatcccagataattttcaggccgtccagcagaagcgtatcgctgaaagtgatcttgcggctgcaatgcggtacgataagacctgcgaggccgcccgttgcgaccacctcgcacggtgcgccgagctcatcttcaatgcggtcgcacaggccgtccagcatacacgccgtgccgaacaccatgccggactgaatgcactccatcgtgttgcggccaagcacctgcggcggcgcggtcagactgacggaagaaagctgcgctgcgcggctcgtcaatgcgtcaagggacgtgccgacgcccggaatgatcactacgccgcacacttcgccgtcggcgtttaaacccgtcagcgtcgttgccgtgcccatatcgatgacgatacacgggccgtggtacatggcttttgccgccacagcaccgacaacgaggtcggcgccgagtgtgttcggcacatcgcgcttcactttcagctccggcacagactgcgcgctgacgatgaacggttccaccttccaaacacggcgcaccgcgcgggcgaggtcatcggtcagccgcggcacaacggagcttaaaaccgcgccgttcacctgcgacgtgtggatattgtataaatgtaaaatgctgagcattgcagaagcgtattcgtcctccatgcgcggcggattcgtcgccatgcgcgtgacgaacagcagcttttccccctcataaacgcccagtgtgatgttggtatttccgacgtccagtgccagcagcataccttttccctccgaaaacaaatttctttgagagcagtatatcacaaaaacacaaaaacgtacagaaaaagttttacccaaaaagccgcaccgaaagcagcgtgagcagcacggcggcaaggtcgccgcaaagcgccgccggaatcgtgtagcgcagcgttttatacccccgacccgaaaaatataccgcggccgcgtaaaacgtcgtttccgtcgaagacgataaaattgccgccaatcgggatattacactgtccgcaccgtatgcgctgtaaagctccgtaacatacgacaccgagccgctgcccgaaagcgggcgcagtaagatgagcggcataagctccgtggggatgttcagcacttctgtcacgggccgcagcagcgcggaaaacagctctaaaaagccggacgcgcgcagcatggaaatgccgacaataagtccgagcagtgtcggcaataattttatcgccgtatgcatgccctccgccgcgccttttgtgaacagctcaaataccggcagtccttttacgtacccgcacatgaccgtgagcgcgatcacgccgcagacagccgccgcgcctatgcccgccacaatttttgaaacacgcggcacattagcacgcagacgagcaggcttccgaatgaaacaagccaaatatgcggcagaacatcatacgggtccgcgctgccgtaggaagcccttaaggtgaccgccgccgaggggatcagctgaaacgacgccgtattcatcacgacgaataagatcatctcttgcgtcggcgcgtcgcccgtctgtaatttctgcatttcgtccatggcactcaatccaaacggtgtggcggcgttgcccatgccgagcatgtttgcggcaatattcatcgatattttttcgcgcacggtttcattttttccgtaattcggaaacagtcgcttgatgaccggcgacagaattttgaaaagcccgtttgtaagccccgcctcccccgcaatacgcatgatgcccgtccaaaggcacatcgcgccgagcagcaaaagcaccgtctccaccgcctgccttgcgccatccgccgcagcagcggaaagtgccgtccatctccccgtgcacaccgcaccgacgaacgccagcacaatcatcgccatccagatgccgttcagcatcctaccctcccctttcattttatttctctgcggaaatttacagagttttgattgattttaacacagatatggattatgatagaagtatattcatttggaaaggatgaaatgtatcatgttcggtgaaaaaattctcgattactgggacgatataatgaaagacctcggcgacatcgtcgccattccctcagtcgcacagccacaggacggcccgtatccgttcggtaaggacgcagcaaccgctgtggataaggcgattgaaattgcggaacgatacggcattaagacgaagaacagcgactattatgcaatgcacgcagagctcggcgagggcgaagaaaacgccgttgttatggcgcaccttgacgtcgtgccggccggcgaaggctgggacagcgacccgtacaccatggtcatccgcgacggcaaggcattcggccgcggcgtttccgacaacaagggtccggcaattgttgcgctgcactgcctgcgcgcgctgaaggaagcgggcatcgtcggcaaacgcaagctgcgcgtcgtgctcggctccgcagaggagattggcatgcaggatatgggccactacttctccaaagagcagatgcccaccatgggcttcaccccggacgcctgctacggcgtgtgccactgcgaaaaaggtctgttccgctttgccgtaaccggcaaggtcggcaagaagatcgtttccttcaaggccggtactgttgtcaatgccgtgccgtataaggcaaaagccgacgtgctctgtgatgacgacgaatttgcaaagcttgtcaaagctgcaaacgctgcggaagtgaagttcgacatcacacgcaccgaaaacggcgcacacatcgtcgcaaccggcaaggccgcgcacgcttctaccccggagatcggcatcaacgccgccgcacaccttgcacacctgctcgtgaacgttttcggcgcagactgcggtgaattcctcacgttcatggatgagaaagtcagccttgcatatgacggctccaacatcggcgttaagatgtccgatgagccgagcggtgcgctgaccttcaacctcggccttgtgaacatcgaaaacggcgagggccgcttcgatatcgacattcgctacccggcaacaaagtccggcgcagagatcgacaaaatccttgcaaagtccgtggagggcacaggcctcacctacacgctcatttccgatgagccgccgctgtacctgccgaaggacggcccgctcgtcagcctgctttccggcgcttatgaggacgtcaccggcaaaaagtgcgacgtcttctccatgggcggcggcacgtatgcccgccagatgggcggcgcaggcgttgcgttcggcgcatcgttcgacgaagaggaatcgaacgcgcaccaggcaaacgagtgcatcaacgtggagcagttcaagctgcacgcacaaatctgccttgaagccatgtaccgcatgtttacagcggactgattttgaattcaggagcgcaccgttatggaatatgcacatatcatgccggaggacatttttaaaaatccagaagtgaaggtctacgtggaggcgggcaacagctgccttggcgcactgggcttcacggagcacggccgcccgcacgccaagcgatgcagcaactacgcgcggaacattctggaagcgcttgattatgatacgcgcacctgcgagcttgccgccatcgccggttatctgcacgatatcggcaacacggtaaaccgcgtcgaccacgcacacagcggcgccattatggcattcacgcttttaacgcgcatgaacatgccgccggaagaaatcgctatcatctgctcggctatcggtcaccacgatgagaaaaccgctttcccggtaaacgccgtctctgccgcgctgatcctctccgataaaagcgacgtgcgtcgttcccgcgtgcgcaaaaacgcgattatcgcaacggatattcatgaccgcgtgaattacgccgtcgtgaacgcctcgctgaaaattgacaaagagcagaagctttgccttttcaacatcacgattgatacggacatctgccccgtcatggagtatttcgagattttcctcgaccgtatggtgctgtgcagaaaagctgccgatcttttggggctcacgttcgagcttatcatcaacgacacgcgtctgctgtaatacgaatcacacctataattcctagaataggagccgcagttcacacattatcgaactgcggctcttttgttttatcgtttgttcattttttcgccgtgtaaattcacgcctgcggcttcaatgccccgtaaaaataactcgccgtcgcgcttgtataaattcactgtcaaaatcgctttaaccggcgcctgactcgccgaaacacccgcgcattccgtgccgtcaggctcagcacctcaggccgcgtgttattctgcaaacttttctcctttgcaatacaaattttgtactcatcgtcacgcggcacccaagcgattcgccttttccaattataattttctctgagataacgtttacttttttacatagtttttatataatgctttgcataccttgggatactgatccatatcaaattttctcgcaaacaaataatccgaagcgatcagttcctcatagtccccgtcctcaaacgtatacggatttccgcgcttccagtcaatccaccgcatgtttgcgtggtaatcgtcagcttccggcggcatcgatagatttccggcaaatgccgactgcatcactaaagtttgcaggaaacactcatcgacacagcagccataagaaaacgcagatttaatccagtcctctttggacaaaacgtactttgcaagcgcgcccgtaatgctgaaccactgcgaaccgcaatacagcctctccatgccgtttcgcttcagccggtcaacccgaagcagcttctgcatctccacaaggccgcgctccatataatacagccaaccggtcggtctgcccaccttttcctgcagcaaatgatagcactttgcccgctcctgcgtcctctcctccatggcaaaatcatgggcggaaaaatggataaattccgttccccgttgctcgaagaaaccccagatttcctgcgccggacgcagcggcagatccgcgccggacagcagatgataatagctgtaatcctccccggaattcgccgcggctttcaataagttcagctccgcttgtatctgggaatacccgccccagtttacccgcgtgcgctccgcaaacttcatcttggaatggcgcagcgaaggccggaacgaatcggcatcaaagtccgtcacatgcgcatcgatgtgcatataaatgtcgttttgctcaaaatccaacatctcgcacagcattttgagctgctcaaacttgttgtgcgcaataatcaaataggcgtgttttcccacgttgtctcctctttccgttttagaatttcccgcccgggccgtcaaagcacacgaaagcccgttgtgtttccattatatatttgaagcaaagcagtgtcaagtatatatataaactttacaactttagttgaaattcgcaaactaaaattacatatttattttcctctaatcaagcatacaaaagcagcgcaccggcagatttttaccgcccgtgcgctgactggattttctgttcttctctttacatcgtaccgaagatacggtcaccggcgtcgccgagacccggcagaatgtaaccgtgttcgttgagcttctcatcaacggctgcacagtaaatatgcacgtccgggtgcgcttcgctcagtgccttgaggccctccggcgctgcaatgatgcacaggaacttgatactgcgcgggcggctgcgctttacaatggtgattgcgtccattgcggaaccgccggtcgcgagcatcgggtcaagcacgataacatcacgctcttcaatgtcggacggcagcttgttgtagtattcgactggctgcaaggtatcgtggtcacggtaaagaccgatatggccgacctttgcgctcggaacaagctgcagcatgccgtctaccatgccgagacctgcgcgcaggatcggcacgaatgccagctttctgccggcgatgaccttcgtcgttgcggtgcacatcggggtctccgtctgcacgtccatcagcggcaggtcacgggtagcttcgtagcacatcagcgttgcgatctcgctgacaagttcgcgaaattcctttgtgccggtgtttttatcgcgcaggaaagagagcttgtgctgaatgagcgggtggttcatgataaaaatctgttcgttgttttccatattgatttctccgatttctgccttacaggcgtccgttttcaatatctgcgatctggtcgatacggcgctggtggcggccgccctcaaagtcaaacttgaggaacgtgtccacgatctccagcgcggtcttctcctcggtgacaaggccgccgagacacagaatgtttgcgttgttgtggcggcgggtcatttccgctgcgtgggcatcgctgcacagtgccgcgcggatgcccttcactttgtttgcggccatggaaatgccgatgcccgtggagcaaacaagtacgccgtaatcagccttgccgtctgccacacagtgcgcgacctttgcgccgtacaccgcatagtccacgctctccgtggaatagcagccgaaatcttcgacttcgatgccttttgcttccaaatgcttcttgacggcttctttcagagcgaatccgccgtgatccgaaccaactgcgatcttcatgctttattctccttcgtatatggattacttattgtttttctgtgcgtttttggctttcagttcgcgctccgcctgcggcagacgcaggtagattggcatcaaagcgtccggcgtgactgtctgtccgctttcaaccatctcctgcgccgccatggcaacgccggaggcacgctgaaagcgaagctgcggctgcaaaagctctgcccggatagccgcaaacgtcttatagcaaagctccgcgccatcgccgacaagataaatcttctccgtaaacgttttgcattcttccaaaagctccgcaatgggcaatgcgcggtcatcacaaagacgtgtgagcttaccgtcctccgcacggaacagcgcattatacacctgcccgcagcgtgcgtccatcacagcacagacgatacccgtcagctgccgtgcgttctccgccatggcgcgcagcgtggaaacgcccgcgcacgggatgttccgcgtcatggaaagtcccttcacgcaggagacgccgatgcgcacccccgtgaacgaacccggcccggcggagaccgccatgcaggtcacatcgtcaagcgttttattcgtgagcttcaaaacagattccaccatcggcatcagcgtctggctgtgtgtctgctttgtgttgatataaaattcagagagtatttttccgtcctccaaaagcgcggccgaggccggcgccgcagaggaatcgagtgctaaaatcagcatatttgtcgctttcacgcgattttttgccgcgcaaaagccgtcctttctatcagaaacttatcacaggtctatgccctcaatggtaacgatgcgctccgtctccgtctcgcccttttccatgtggacataaatcgtgttttccggcaaagcgccgtcaatgttttcgctccactcaatgacgagcacgttgtccgtatcgaggtaatcgaaaaagcccgtggagtagagatcgtcccaaccggaaacgcggtacatgtcaaagtgctgcaccgtcagccgcgcatcgtattcgttcacaagcgcaaacgtcggactggagaccacgtccccgccgccaagcgccagcacaagtccgcgcgtaaacgccgtcttgcccatgcccatcggtcccgtgaacgcgatgacctcgccgcccttgagcttttccgccagcttcgccgcgattttttcggtgtcctgcaccgagtgagaaacaaaccgttgcatcagaacaggccgtggatcacgccgttaccgtcgacgtcgatcttttcggcagacggcaccttcggcagaccgggcatcgtcatgacatcgcccgcatacgcaaccacgaagcccgcgccgttcgagaggcgcaagtcacggatcgtaatgttgaagccggtcggacggccgagcagcgtcgggtcgtcagaaagcgaatactgcgtctttgcgatgcacaccggcagcgcgtcgccgccgagcgccttgatgtccttcagggacttcatcgcctgattcgtgaacgtcacgtcatccgcgccgtagattttctgcgcaatcgtgcggatcttctcctccactgtgagatcaaggtcatagatcggcgcaaagtggcttccaggattctcgtcgatgaccttgcagacggtcttagcaagctccacgccgccttcgccgccctttgcgaacacttcggagagtgcatactctacaccgagggacttgcagcaatcgtcgatgactttcagctccgcgtccgtatcggtgccgaagcggttaatggcgacgacgaccggcacgttatatttgtgcatgttctccacgtgtgcgcgcaggttctcaatgcccttttcgagcgccggaacattctcctttgcaagctctgccttcggcacgccgccattgtatttcagcgcacgaaccgtcgcgacaacgacgatgcagttcggcttgaggcccgccaaacggcacttgatgtcgaggaacttctccgcaccgaggtcggagccgaagcctgcttccgtaatgcagtaatcgccgagcttcagcgccaagcgcgttgcgcgcacggagttgcagccgtgcgcaatgtttgcaaacggaccgccgtgcatgatggccggtgtgccttcaatcgtctgcacaaggttcgggttgatggcatctttgagcaaagccgtcatagcgccatccgccttgatgtccttcgcatagaccggcttgccgtcatacgtatatgcaatgaggattttgccgaggcgctctttcaggtctttcaaatcctttgcaagacacaaaatcgccatgacctcgcttgcgacggtgatgataaagccgtcctcgcgcgggatgccgttcaccttactgccaaggccgatgacaatgctgcgcagcgcgcggtcgttcatatcgacgcagcgcttgatgagcacacggcgctggtcgatgcccagcacattgccctgctgcatgtggttatcgagcatggcgcacagcaggttatttgccgaagtgatggcgtgcatgtcgcccgtaaagtgcaggttgatgtcctccatcggcaacacctgtgcgtagccgccgcccgcagcgccgcccttaatgccgaacaccggacccagagacggttcacgcagcgcgatgacggcctttttgccgatcttcgccatagcctgaccgaggccggccgttgtggtggtcttgccctcgcccgccggcgtcgggttgatggccgtaacaaggatcaacttgccgtccggctcgttttcaagtcttttgaacaggtcatcattcagctttgctttaaagcgtccgtagggctccagctcttcgggacatacatgcagttcttccgcgatctccgcaatcggtcttaattttgtctgctgcgcaatttcaatatcggtaagcattgcaaccaacctttcatttccgttcttttccgttttgccgcacgccgcagcatgcggacatcgttataccttatagattatagcgcaaaaaggcgtttccgtaaagaggaacgcgcttttttaacggaaaaaaatctggatattgccccttccttttctgtgtgatatactaaaatagaaattttgttgaaattttactttttattcctaacatcttacaaagacttttacgctttgttttactttggcttcttctgatttttttgaaagcaggtgatcttacgaaagacagccgcattttccttgctgtttcgtcctttttccgtcgcacggacaagcttctttggcttttgatgctcacaatatccacgttcagccttattcttctgaaaagtgtttcccgcgcgatgaacacggattatttcaaaacgcagctcgtcgtgaccgttgcgggccttctcgcggcgcttgtgctctccttcatcgattacgaaagcattgcgtcgttctggtatctcatcgcgggtttttccgtttttatcatgctctacaccatgtttttcggcatcagcgtgcagggcagcgagggcgtcaacgcgcgcgcgtggatcagccttgcgggccgcacgttccagacgagcgagcttgtgaaaatctgctttatgctgacctatgcaaagcacatctccgttttgcgcgtgcaaaataaaatcaatcatcctctgcacgtcgttctgctcgcgctccacgcggcggtgcccgttctgctctgccatgttcagggtgatgacggcgccgcgatcgtttttttcttcatgttcctgtgcatgagcctcggcggcggtgtgcagctgcgctatttcattttgctcggcgcgcttgtcgccgtgtccgtgcccgtgctgtggaaatttgttctcagcgaatatcaaatcaagcgcttcacatctgtctataatctggacgacccctctattcagctcaatgaaggctaccagcaggtgcagggacgtatctccatcggcagcggccagctgaccggcaaagggctgtttaacggtccgcgtgtcgaaacaaacctcgtcacgttccagcacagtgattttatcttctccgttgccggcgaggagctcggcttcatcggctgcaccgccatcatcgtattattgttattgtatctcctgcgcgtgctgtatatcgcgtcaaaggcgagggacgacctcgggcgctgcatgtgcttcggctttttcgggctcatcgctttacagtctgtctcgaatatcggcatgtgcctggcgcttctgcccgtcatgggcgtcacattgccgttcttctccgccggcggcagcagtgccgtgtgtctgtacctcggcttcggcctgatacaaagcgtatacatgcatcgccccgacgccaacgttcctcacctgcgcagtacaagaacgctgaaaatgaacttccgtaaattaaacgcctaagcttccggtaaccatggctaaaagtctttcgtcacgcttttattcttcctgttttttcacgtacaaatatgcgtttttctccttacccacacgctccaaaacacccatggaatacagcacattcgccgcacaccgcgcctgcgtctgcgagcgtcgcatcgcttttgcaagcgttttcgtcgtaaatggctccggcaggtcttcgggcagcaaattcaaataatcccaacggctctcgcagatcacttcgccgagcagtgcttccgggatacgctccccacgcgtcgcgcgcagcttcttttgcttaccgtaaccgtcgaggtacttgtagtccgtcacctccaaaagcggaatgcacagccggaaattcgggtgcataagctgatttttgatcttatacagctccgggaaaacatcatatgctgcgccctttttcggtgattttcgcttttcgaagatctcgcccgtttcggggtccacccagcacagcccgcgctttggcaccacagggtataccaccgttacgcgcgccgcttccaaaaacgcgtcgagtttgcggcccagccggtcaaacccgcgcgtttgaatttcgatgattccgttttcgccgacaatatccgccacaaagccgcccaccttcacttcgcggctctcaaaatcgggttcgtagtagcttttcagcgccgcgtgcaaagctttttccgaaagcgtaccgatgccgcctgcgccgccaacgcgccccagcgcctcttttcgcgcctgtaaaaaacgttccgtgtcgatcacgcgctcccccctctgccggtttataaaaacagtatatcgaaaaacatggtaaaaagcaacagaaaagggcggcacagccaaagccgcaccgccctaagggaaacatgtgaagatttagaaacggttacgctctgcgctcaaacgtgcagcattccgtctcgctgacaacctccgggtctgcgcaacagcaacccacacagacgcagtccgcgctgcacttgtggttatcgttatacgtgcagtgctcggcgctgcaatgcacatcagctgtggcgctcggtgaagacgagcatccgcaggagttttcggaggaagacgtgcgctctgcataagagccgcagcaggtctcgcggctttccagcgcggcggggccgtccacctgaattttgcgcagctcgcacaggtcgtttgcgttgtgtcggcaggttgtcacgctacatttcagcttgttcatatcggtccagatcctttccttttgaatttctaagttcgtgccgcactttggcgacttctttagcctgcccgcaaagtcggggtttatgcaaaagccacatcggcgaagtcttccgcagcggctgcaccttcacccgcggctacggcaagatcttctatttccagccgggccacgagacgaacggttccttctccaatccgtacgtccgccgcatcatccagaacgccgtgcgttggtgctataatgataagaacagacgcatcaccctcggcgcaccgagcatcgaagtcacgctcgagcaggctcgccttgaaggcaacaccggcgaatacctcaagatgtgggactaactcgcttttctaaaacagaataattttaccgtttcgcagtccacggctctgtgtttgcagcgccgtgggctgcttttcttttatatcctgccccgaaaacccgcacagcgcttgaaaaaacacggaagatatggtatactaaaccgatatcgcccgagcggcgacgcgtgtgcgcgatccgtttcgtgtattcgcatattttatacggcaaaagagtaaaactactggtatattgttcttttattcttttgaaaattctttttgaacactcaaaaaagtgtttgcgcagtgattttctgcgcgggaaggagccctttatcatgaaaaaaacagtttgcgtgatcttcggcggcgcgtcttcggaatatgaagtttcgctgatgtcctccgcttcgatcatccgaaatctcgatacagagaaatttgacattctcaccctcggcatcacaaaggacggtcgctggctgctctattcgggtgctgtggaaaacattgaaaacaacacgtggatgaacagcgaaaccgcgcgccccgcgttcatctctcccgataaagcgacgaacggccttgtcgttctgaacgcagacggcagctgtaccgttttgaaggtcgatgtcctcttccccgtgctgcacggcaaaaacggcgaagacggcaccattcagggtctctttaagctcagcggcatcccgtatgtcggctgcggcacactggcttccgctgtgtgcatggataaagccgtcacccacacgctgctttccgccgcgaacatcgagcaggcgcactacctgtggttctacgccgaccgctatttcgcagacggcgagaagatccgcaacaaaatcgccgcacgcctcaatttcccggtgtttgtaaagccggcaaatgcaggctcctccgtcggtgtcagcaaggtgacggctcccgaaaagctcgacgccgccatccgcctcgccgccgaaaacgatacgaaggtcgtcgttgaagaaggcatcgtcgggcaggaggtcgagtgcgccgtgctcggaaaccgcggcaaaagcgtcgcttccccggtcggcgagatcggtgcaggtgcagaattctacgattatgacgacaaatataagaacggcgtcgcacagctcttcatcccggcgcgtctgcccgaagacattgcggaggaagtgcgcaagacggctgttcgtgcctacaacctgctcggctgcgacggcctttcccgcgtggatttcttcgtcaccgaaaaggagcacagggtcattttaaacgagatcaacacgctgccgggcttcacgtccatcagcatgtacccgaagctctgggaaaacgccggtaccccgtacagcgagctgcttgaaaagctcatcgactgcgctttcacgcgtgaagactaacgcgaggcgcaatttatggataacagacccatcggcgtatttgattccggcctcggcggcctcaccgccatgcgggagctgattcgcaccctgccgaacgaaaatatcctctacttcggcgataccggccgcgtgccctacggctcgcgcgggcgcgagatcatccgcaaatacgcaaaacaagatatgaattttctcatccggcacgacgtaaaagccgtgttggccgcctgtggtacggtcagctctgttgcccgtgacatcggcgatgcgctgcccgtcccctattttgatgtgctgcgccccacagcgcgcgccgcggtggagcaaacgaaaaacggcaagatcggcattatcggcaccgccgccaccatcgcttccggctcttaccgcaaggagatcgagcgtctcgcgccgaaaaccgaagtgttcgagcaggcgtgccccttattcgtgccgctcgtagaaaacgcattcgtctcgccggatgaccctatcccgcgcctgacggccgagcgctacttaacgcccatccgtgaagccggcgtggatacactcattctgggctgcacgcattaccccatcatcagcgagaccatccgccgcgtcatgggcgaaaacgtcacgctcatcagttccggtcgcgaagccgccaaaagctgccgcaccgtgctggaggaaaacggtctgctgtgcgacggcaaaaccgacggtacacagcagtattttgtcagcgacgacaccgaaagcttttataaagtcgccgagctcttcctcgggcaaagcgttgaaagctgcgtggaatgtatagatattgaaaggtactgagtgattatgcgcgaagattacgaaatcaccatcatcggtcgccaaacgattgacgcacagaccgatgaaattcagatggatacgctcggcgattacaccgagcgcggcggcgcaaagtatatctcctacacggaatatgccgatgaagcgccgtataacggtcagctcaaagtgctcaaaatcgaaaatgaggataccgtcaccatgctgacccccggcacgcccacccgtctggtgctggaaaaaggcaagcgccacaaatgcctttatgataccggcgcaggcgtgctctccctcggcgtatatacacagacgttaaagcatgacctttccgctgcgggcggtgagctgtgcatccgctatacgctcgacatcgatacccagctttcctccagcaacgaaatctgcgttcgcctgcgcaagcgtgatctattcaataaataaaccgaaaggaacatcccctatgtctaaagcagtaagcattgcaaaagaacaggtttctgccgtcattgaagcggcgatgaaaaaagcgatggttgcgggcatgctgcccgaagcagagctgcccgctttcactgtagaacgcccggcagaccgctctcacggtgatttcgcaacgaacgccgccatggcttccgcgcgtgcattccgcatggcgcccccgaaaatcgccgcggctatcatggaaaatctcgacctcaacggcacctacttcgttaaggccgagaccgccggccccggcttcatgaacttcttcctcggctccgcgttttacagcgatgtgctgaccgaagtgctcacaaaagacagcgcatacggcagaagcgactacggcaaccaccgcaaggtcatggtcgagttcgtttccgccaaccccacgggtcccatgcacatgggcaacgcccgcggcggcgcgctcggcgattgcctcgcctccgttctggatgccgcaggctacgacgtttggcgtgagttttacgtcaatgacgccggcaatcagctcgataaattcggcctctccctctccattcgctaccagcagctcttcgcggaaaatccgccggagctcccggaggacagctaccacggcgaagacattcttgacctcgccaaagagtacgccaaagagcacggcgatgagctgatgcacgtcaccgaagaagagcgccgcaaggcactcgtcggcttcggcctgccgaagaacatcgcgaaaatgaaggccgatatggaaaaataccgcgtccattacgaccgctggttcctcgaaagcgacctgcacaaggacggcgaagtcatggccgtcgtcgattacctgcgcgaccgcggcctcacttacgaaaaagacggcgctgtctggtacaaggcaaccgagttcggcggcgaaaaggacgaagtgctcgtccgcgccaacggcaacccgacctactttacggcagatatcgcctaccacaagaataagttcgaccgcggcttcgacctgctcatcgacatctggggcagcgaccaccatggccacgtcgcccgcatgaagggcgcgatggacgccatcggtcagagcgccgataagctcgacatcatcctcatgcagttcgtccgtttgatgcgtgacggccagcccgtgcgcatgagcaagcgtaccggtaaggccatccagcttggtgacctgctcgatgaagtcccggtcgattccgcaagattcctctttaacatgcgtgaagcgaactccctgctcgacttcgacctcgatctcgccgtgcagcaggattcacagaaccccgtgtactacgtccagtacgcccacgcgcgtatttgcagcatcctgcgcgcactggaagccgagggcgtcaccccgcgcgactgcaccgcagaggagctcgcattgctcaccgcgccggaggagcttgaactcatccagcacatcgcgtcttacaccgatgagatcatcggcgccgcaaaggactacgacccggtacgcatcacgcgctatgttatcgagcttgcaacaaagttccacaagttctacaatgcctgccgtgtaaagggcgaggaagaaagcctcatgcaggcgcgtctcaccctctgccgcgccaccgcaacggtcattcgcaacgtcctcaccatgttcaacatcactgttccgacgtccatgtaatcataaacagcaaagaagtcgctcccgtttccgagagcgactccttttgtataagaaaaccgacggcacaagttccctcatgccgtcggttttttctatcctgttatgcgcaaatgtgtggtattacacgttatactctataaattattcacctgcgagcttcttgccaagcgcaatgcacgctgcgtctgcttcgtcgtccggtgcttcgttgcagatgacgttctcgcctgcgaagaccgcgccgtcaccaaggcaggtctcttcccagttacgcatccattcgccgtcgccccagccgtaagagccgaacagcccgatcaccttgccggaaagctttgcttcgcactcggtaaacaccggctcaaactccgtgtcctccagctgctcggagcccatggacgggcagccgaacgccacagcctcatagttatccatcaagtctgcggagaactctgtgcagttatatacatctgcttctgcgcccgctgcgcgaacgccttctgcaaccttttccgccatcatctgggtgttgcctgtaccactccaataaacaactgctgttttacgcattttttgtaacctcttttcaaaaatttctttatatgtcaggcagctacggtaagctgcaaaacacttctgccttcctgccacaaacgcttgtagatgtcccggcacttcttataccgcgcaaatgtgcgcactgcctcgcattcgttgcagtacaccttccaacatccgcagcacttgcagttctgcccggcgttttcaatgaacccaagcacgtcctccaccgggtagccgaggaaaagcccaatctcatgcgggaacccgtctccgcttgcaagccgcatgcgcagccgctctatcgcgccgtccgcgctcgtgtcggtgtagccgtagcgttccaaaagctcttttgcgccggggcgctccaggtcttttgcaagctgcgtgcggcggcacacataaatgagcatcgcattttcttcgcgctttaagatcagcagctccacgcctttatcgcggaatatgcgattcaaatgctttacgtcgtcctccgggtcctgcgccgcgtggtaggaaaataaactcgccgttttaagcgacgccagcgtcggcgcacaatgctcgatcaagtatttctcaagcattgaaagcacactctccgcgcacagccgcacagcaatctgccagtacactgtgcagcgccgaggcactgctgctcggcacatacgcgatcggaatgttatttcttttcgcttccttggaagcgctcagcatcattttgtgcgagaccgtgctggtgaaaagcaaaaggtagtccggcgtgccgagcttctttttcaaggagccgttctccttcacatacacctttgctttgcagccatggttcttgcagatgtccatgtactgacataccatgcgttcattgccgccaacgatcactacgctcatattctatcctttccgcctgcaaaagcgtttcacaggccgcccgcaaaaccgggctttgcatttgatttaagttagcttacactaacttgtttgttttaaataaagcggattctcaccgctatgtgttatcctcaaagttagtataaactaacttgctcatagtatactaaactcgtatacatttgtcaacccctattttgattttttattcggaagctttcaccccgccgtttttcgcagaacgaaagccgcgttccataacccggctttatcttcatttattctgcttttacctatatccccaatgcccgctcttcttgcgcagcttcactttcccccgagacggcagcgccgcagcccgccgcacgcaagaccggcacgcaaatttccgtaaaaaataagcgcagagaattcctctgcgccaagcttattcttcgtttttcaaaaaggcttcctgcaccgattccgcgcggctttcggccacaagcaccaacccgcggcgtttgtctcccgtcagcacggcgctttccccggccttcagcccgataagcgccaaggcctctttcggaatatgcacaccgccgttttcgtcgatctgcaccgtccacattttgcggcctttcggcacccgtttttccatacgccgctccttaataatacgccgtcagcggcacattgccgttttccttgcccgcgtccatcttcacgctgtctatccactgcactgcgcgtcctgcgccgagaatcacgcagtcctccggctcctccgcaatgcgcacgcgcattttcgtctgcttcgagataagcgtgtccaacccacgcagcttcgcgccgccgcctgtcagcacaatgcccgcgttgccgacgtctgccgtcagctccggcggcgtctcctccagcacactctgaattttgtgcacaaccttcacaacggattccagcatggcttcgccaatctcgtcggaggtcacttccacctttgcaggcaggccgttgcgctcgtctctgccgcgcagctcgtatttttcaatgtccttcagcgggaacgcgcagcccacggcgcactttgccgcctctgccgtctgctcgccgataatcaggtcaaactttctgcgcgcgtatttgataatatcctcgttgaacaccgcgccacccacggcaatgctgccgcttgcagaaagccgattcatcgaaagcacgccgatgtcactcacaccctcgccgagcgtgacgaccatactgccgtgcggacgggaaatatccagccccgcaccaatcgccgccgccaccggcgcttcgatcaagcacaccttgcgaatgccgttcgctgccacagcgtccaccaccgcacggcgctccacttccgtaataccgctcggtaccgccacaacggcgcgcggcatgaaaacgcggctgttcgtcacctttttcaggtagtgctgcagcgtcgcgtccatcagcgtcaaatcggaaatcacaccgcccgtcacgggcttgaccacgcgcacgcgatcactcgttctgccaagcattttatacgcgcggcggcccacggccaccacacggttagagtcttcatctacggcgatgacgttcggttcatccaccacaacgcccttgccgtctacatataatctgaaatttgccgaacccaaatcgatcgcaatatccgtaccggccatggtaccatcctctcgcgttatactgtcctttattttacatgactttttcccgttttgcaaggtctaatcgaccgtcgcgcacgaaacacagcccacatagtccgccccgtttcggtacaacacctttgtgcattccacggccgtcgcgccggtcgtcacgatatcgtccaaaagcagaatacgcagccgcgccgcatcctccgcgcggtacgccccacgcacattcgcttcacgttccttggcgctcaaattgtgctgcgtgcggttgtgcttcgtcttctccaaaatatccgttcggcacggaatacccgtcagcctcgatacctcttttgcaagcagcaccgattgatcgtacccgcgctgtttcagtctctcccggctgataggaaccggcacaatacagtcccaaacccggtttttatcgatcgccggcagcattaactttgcaagcggtttcgcaaggttcgtcccgtttttgaacttgaaccgccacaaggatgaccgaaacggctccttgtaccgctgcggcgcacggcattccagtgtgtaatcccgtcttcctgcatgcaacgcgaaaaaccgcacgcgaatatccggctgcagcttcgcgcaatccgcgcacaactcgtcctcgtccaccgctcccgcacgcccgcacaaaagacatcgcttcgggtaaaagaacgtgagaatcttctctaaaacgctcatgcttccgcttcctcattctgctccggcccgtcttcctccggcttttcgagcaaaaagtgctgcaagccggaaaaccgccgcgtctttttatcgtttgccaccatatcggcgactacactgcgcttgccaaccaaaatcagcagctttttcgcacgtgtaatgcccgtatacagcaaatttcggtagctcagctgcggcgcacccgggaacatcggcatcaccaccgccgtaaactcgttgccctggctcttatgtaccgtcacggcgtaggcgagctccagttctgctgccgcgtgctcaaaatcatacaacacctctttgtcgtcgatttccacacgcagacaaccggcatctttgtccacatcgatgatgatgcccatgtcgccgttatatacgccttcgcccaccgtgccgtcttcgcggctccacggcaggttgtagtcattcttgatctgcatcaccttgtcgccctcgcggaaaaccgtgccgttcaccgtcacctgcggcttgtttttcgcgggcgggttaatctgctcgcgcagcttacggttcagctccaccgtgccaagctcgcccttgcgtcccgggcataatacctgaatgtccgtcaccggcgaatacccgtagcttttcggcaagcgcgtcaccacaagcgactgcaccgtctccgaaacggagcgtgcatcctcgcgcggcataaaaaagaaatcgttgctgcgcacggaaagctccggcatctcgccctccacaatcttgtgcgcgttcatcacaatgagactctccatcgactgacggaaaatctccttcagttgcactgttgggaataccttcgacgcaataaggtctccgatgacattgcccggccccacgctcggcagctggtcgctgtcgccgaccaagatcaaacggcagccgatgggcagcgcgcgcagaacactttcaaacacatacgcgtccaccatggaaagctcatcgatgaccactgcgtcacactccagcggattgcgctcgttcctctggaacaccgggtcatcgttgtcgtcccagtccacctgtaacatgcggtgaatggtcttcgcctccacgcccgtcagctcggacatgcgcttcgccgcgcgccccgtcggcgctgccagaaataccgtctcgcctttttccatcaaaatgcggataatcgcgttcagcgtcgtcgttttgcctgtgcccgggccacccgtcaaaatcaaaagccccttttccagcgccgcgcggatcgcatccttctgcaattcggcgtactcgatgccttctgtgcgctcgatttccgcaatctcccggtcaatgcccgtaatggattccggcgggtagcgcagcatcatatggatgcggtcggcgcagtacacctcgctgcggtgctgcttcggcaaaaacacgaagtcacgcccgttaaaattctcgttcaccgcctcaaacgtctggcacagctcaagtaaagcctcctgcgcactctccggcggcacgcccaaaagcttcgcggccgccgcgcacagtttatccgccggcaggcacgtgtgcccgttattcaaattgtgccgcagcacatacagcacgcccgccttcacgcgctccttgttgtcgcggtcatactccagcgactctgccagctgatccgccaccgcaaacgaaatgccgatcttatcgctgcacagccggtacgggtcttcctgaatgcacgccacagagtcctgcccgtacaccttccacaccttcacggtgtcctccgggcgcacgccaaagctgccgaggaatgccatcaaatcgcggatgccgttcacgcgctgcatctcctcggagatttctttcgcctttttctgcgtgatgccctttacggttgcaagccgcgccggatcttcctcgatcaccttaatggattcatcgccgaacgcttctataattcgccccgccagcgcgccgccgatgcccttcaccgcgccgctcgaaaggtatttcagcatcgccgccgtgtccgccggacgggagcgctcaaacgcctgtgcgcggaactgctgcccgaacgtcgcgtgcgatgtccacgtgccatacaggtgcagccgctcccccacactcacatacgggaacgtccccaccaccgtgatgagctcttcgccgcaatcgacctccaacaccgtgtactggttgctgtcgttgtggtagacgatattttccacgctgccttccatttccagcagcccgttttcctgcggcatcggttgcgcctccttgatttatcatcaaaacaaatcctttggggtttgttttatttcacttttcgcgcaagcgaaaaatttcacaatacgtaagtatgatttcacattcggcaaagccgaatatttcactgaaacattactgccttcattacttaaatttctacgcttctattatagaacattctttcgtgtttgaaaagccccaatctccgcaaacgggtatttttgcacaagtctgcggataatcgcgtcgatctccgggtcgtttgtcgggttcaggcacacaatgcggcacatgccgtataaatccagccacttcacgcgctccaaaacactgcgcacaatatactctgcgtcgtccgcgcggcgaatcgtcgcatacaccgtaaacggcagcgcatcctccagcattttcgaacgtgtcacgcgcaggcaaacgctccgcacagcaaataaaaagatacacagcgtaaacgcgcacaccaaagcaatcccgataggctccataaaaaacacctccgcgccagtctatgacgcgaaggtgcattcggttcttattctgttttgcgcaaattaaagcacggcagccttcagagcctcgaccttgtcggtcttctcccactgcacgccgagctcctcacggcccatgtggccgtaagcggcgagctgacggtaaatcgggcggcgcaggtcgaggttgcggatgatcgcgttcgggcgcaggtcaaagaccttctgcacagcctcggcaagcttggaatcctccaccgtgccggtgccgaacgtatcgaccataacggaaaccgggtgtgcaacaccgatggcgtatgcaagctgcacctcgcacttttttgcaaagcccgcagcaacaatgttctttgcaacataacgtgccgcgtatgcagcggaacggtcaaccttcgtcgggtccttgccggagaatgcaccgccgccgtgacggcctacgccgccgtacgtatcgacgatgatctttctgccggtcagaccgctgtcacctaccgggccgccgatgacaaaacgaccggtcgggtttacataatacttcgtgttctcatcgatgagctccgccggaacgatcggcttcacaacatattcgatcatatccttgcgaatctgctccagagagacagcctcgctgtgctgcgtggaaataacgatggtgtcgatgcgcttcaccgtgtcgccgtcgtattccgccgtcacctgcgtcttgccgtccgggcggaggtagtcaagcgtgccgtccttgcggacttttgccagctgctttgcaagcttatgcgccaaagagatggtcagcggcatcagctccggggtctcatcgcaggcatagccgaacatcatgccctggtcgcccgcgccaatgaggtcgtcctggtcagcggcgccgtttttcgtctcaagggattcgttcacgcccattgcaatgtccggggactgcatgtcgatggaggtcagcaccgcacaggtcgcaccgttgaagcccgcatccggagaatcgtaaccgatctctttgatgactttacgcgcaatcgcatcgatgtccacatagcactcggtggaaatctcgcccatcacgtgcaccataccggtcgtcgccgtcacttcgcaagctacatgcgcggtcgggtctttcgccatgatatcgtcgagaattgcatcggaaatctggtcgcaaaccttgtccgggtggccttcggtcacggattcagatgtaaaaagatgtttgttgttcatgttttgctcctttactcttttcactcacagcccccacaaggaattttcggaaaaaaagaaccgctcaaaagatgagcggttcaaaatcctcatctttcggcattgccatgccgcaggaattagcaccttgcaaaatgcaggttgccggacatcaaagggcctgttccctccgtcactcttgataagggcatattcatttttgactgtaaaaaagtatagcacagtttttcgcaaatagcaagggaaaaaaccgcagaaaatcccggctttataccgacaaattccggcatatcatacgactttgccgttgatgaccggctccagctttttatataccagaatcgtgataaccgcactgatgagccccttgcagaacgtaaacggcaagttaaagatcaaaagcgcctgccacaactcctgcacggacggattgattgcctgatacatgcccataatggcctccatcggcatcacattcgtgtagattgggtaaatgatgaacagattcgagaagaatcccagcaccgccatcaaaagcgcgccaacaacagagcccacaatcgcgccgccgtaattgcggtggtggcggtagatcaaccccgccggcaccacaaacgcagaaccgataatgaagttcgagagctcacccacaccgccggtgatggtctgcgaaagcagcacaagatttttcacaaagcaaacggcaacgccgctcaccggtccaagcgtaaacgccgcgatcagtgccggcagctcggaaaagtcgagcgaaataaagctcggcataaacggcagctggaaatgtaaaaacatcaaaacggtcgcaatcgccgccagtacgccggtcattgcaattttacgaatattcacattggaagtttttgcagtatttacggtcataaatgtcagaacctttctgtatgaatatcaggcagcgcaaggaaattcactcgcgcttgcattttccctttatgggaaaacgcaaatccgcgcagcgcagcctttagaatgccgcataagccatgcgcattcccaacttatactatgtcaatacagaaacgggggtaagaatcaaaaaagcaccccacgaaaactcgcggggtgccgaaatccttttgattcacgtttcttctatcatccggactataccgtcggctccggaatcacaccggatcagcgcaaaactgcggtcgcgggcttatgccaaaggcatttaccgccggtgaggaatcacacctcgccccgaagaaaatgatgagattttagtttgagcaaaaattactcgttgatacccgtaacaacgccggaaccaacagttctgccgccttcacggatagcgaagcgaagaccctcttcgatagcgatcggggtgatcagctcaacgtccatgacaacgttatcgccaggcatgcacatctcggtgccttccggcagagagataacgcccgtaacgtcggtggtacggaaatagaactgcggacgatagttgttgaagaacggggtatgacggccgccttcgtccttggtcagaacgtaaacctggcccttgaacttggtgtgcgggtgaatcgtgcccggcttggacagaacctggccgcgctcgatgtcggttctctggataccacggagcagaacgccgatgttgtcgccagcctcagcaaagtcgaggagcttgcggaacatttcgatgcccgtaacaacggactttcttctctcgtcggtgaggccgatgatttcaacttcgtcagacatcttcagaatgccacgctcaactctaccggtagcaacagtgccacggccggtgatggtgaagacgtcctcaaccggcatcaggaacggctggtcagccttacgttccggagtcgggatgtagtcgtcaacagcatccatcaggtcgaggatgcacttgtactcaggagcgttgacgtccttggactcgctggtgagtgcgaggtaagcggaacccttgatgatcggggtgtcatcgcccgggaactcatactcgttcagcaggtcacgaatctccatctcaacaagctcgaggagctcttcgtcgtcaacctggtcgcacttgttcatgaatacaacaatgtacggaacaccaacctgacgggagaggaggatgtgctcacgggtctgcggcatcgggccgtcagcagcggaaacgacgaggatagcgccgtccatctgtgcagcaccggtgatcatgttcttaacatagtcagcatggcccgggcagtcaacgtgagcgtagtgacgcttgtccgtctcatactcaacgtgagcggtgttgatcgtgataccacgctctctctcttccggagccttatcgatcatggagtaatcctcgaactgtgcctggcccttcagagcgagaaccttcgtgatagcagcagtaagagtagtcttaccatggtcaacgtgaccgattgtaccgatgtttacatggggcttatttctttcgaacttagcctttgccattggaattgcctccttttattcagtaaaataaccttttgagtttattaccattgtagcaacaaaccgcaaaaaaatcaagtagtatttcgctttattcagccttttttctggaagcgatgatcgtttcagaaacagacttcggaacttcagcgtagtgagagggctccatggtgtactgaccacggccctgggtcttggaacgcatgtccgttgcgtagccgaacatctcagacagcggaacttcgctggtgatctgcatagcgcccggagtagcctcctgattctgcatgatgccgcgacgggagttgaggtcaccgataacgttgccgaggtattcctccggaacggtaacaacaaccttcatgatcggctccatgatgaccggatcagccttgcgcatagcatccttaaatgccatggagccggcgatcttaaaggccatttcagaggagtcaacttcatgataggaaccatcatacagcgtgaccttcacgtcaacaacgttgtagcctgcaagtacaccggagagcattgcgccctggataccctggtcaacagccgggatatattccttcggaaccgtaccgccgacaacagcgttgacgaactcgtagcccttacccgggttcggctcaatacggatcttaacgtgaccgtactggcccttaccgccggactgacgagcatacttcatatcggaatccgcattcttgcggatcgtctctttgtaagcaacctgcggcttaccgacgttagcctcaaccttaaactcacgcatcagacggtcaacgatgatctccaaatggagctcacccatgccggcgatgatggtctggccggtttcttcatcggtataggccttgaaggtcgggtcttcttctgcgagctttgcaagtgcaatgcccatcttttcctgaccggccttggtcttcggctcaatcgcaacgcggataaccggctccgggaattccatggactcaaggatgatcgggtgcttttcgtcgcaaagggtatcaccggtggtggtgttcttcagaccgactgcagcagcgatgtcgcctgcgtaaaccatttccagatcctgtctgtggtttgcgtgcatctgaacaatacggccgatacgctcggtgttatcctttgtggagttgtaaacggtggaaccagccgtaagcgtaccggagtacacacggaagaagcacagcttaccgacgaacgggtccgtagcaatcttaaatgcaagagcggagaacggctccgtatcggaagagtgacgaacgtcctcttcttcggtttccgggtttacgcccttaatagacggaacatccgtcggggccggcatgtaatcaacaatcgcgtccagaagcttctgaacacccttgttcttataggaagtaccgcaggtaaccggaaccatcgtattgttgatggtggacttgcggatgcaggtcttgatctcatcgatcgtgagctcttcacccatgagatacttctccatgagtgcgtcgtcctgctcggcgacatgctcgatcatctcggtgtgatacttctctgcgagctctttcatgtcttccgggatctcttcgcaacggatatccttgccgagatcatcatagtagacataagccttcatttccacgaggtcgatgaggcccttgaaggtatcttcagagccgatcggcagctggatcggtacagcgttgcacttcagtctctcgcgcatcatgttgacaacgcggtagaaatcagcgcccataatgtccatcttgttgacatacgccatacgcggaaccttgtattcctcagcctgacgccaaacggtctcagactgcggctcaacgccgccctttgcgcagaaaaccgttacggaaccatcgagaacacgcagggaacgctcaacttcaacggtgaagtcaacgtggcccggggtgtcgatgatgttgatacggttctggtgaccgtttctgtccggccagaagcacgtcgtagcagcggaagtaatcgtgatacctctctcctgctcctgtgccatccagtccatcgtagcggaaccgtcgtgggtctcgccgatcttgtagttgacgcctgtgtaataaaggatacgctcggtcgttgttgttttaccggcatcgatgtgcgccatgatgccgatatttcttgtaaattcaagtggtacctgacgggccatataatcctccttaatacgtttacaggtaaattaccatctgtaatgtgcgaaagccttgttggcttctgccatcttatgcgtatcgtcacgcttcttagcagcgccgccggcgccgttcagagcgtcaaggatctctccggccagtctctccttcatcgtcttttcagaacgaagtctggaatagctcgccatccagcgcagacccagggtctgacgtctctccggacgaacctcgatcggaacctgatagttcgcaccgccaacacggcgtgccttaacctccaggctcggcattacgttctccatagcctgctcgaaaacctccagagcattcttgcccgtcttctcttcgacgatctcgaatgcttcgtaaacgatcttctgagctacgcccttcttaccatcatacatgatgttgttaatcaggcgtgtgaccagtttggaattatacataggatccggcaaaacatcgcgttttgctacattgcctcttcttggcatagtcttccctccttcacataatagtatgaattcatcggtactcgaaagcacaagctcccgccggctaagaaaaggtatttacgcacgataatcagtagcttatctattataaatacccttaaagcgaatttcgcttttccggtcaaaagttcattgtgtaacgattaaatttggctctttaaagaaattacttctttgcagcgccggccttcggtctcttagcgccgtacttggaacgagcctgcatacgctttgcaacaccctgcgcgtcaagcgtgccgcggatgatgtggtaacgtacaccaggaaggtccttaacacgaccgccacggatcataacaacgctatgctcctgcaggttgtgaccaacacccgggatgtaagcggagacttcgataccgttggaaagacggactctggcaatcttacgaagtgcggagttcggcttcttcggggtagcagtcttaacagcagtgcagacaccgcgcttctggggagaatcctgatcgatagcaattctcttcttggagttccaacccttcagcagtgccggcgcctttgccttcttctcggaaactgcgcgacctgtgtgaatcaactggttaaatgtgggcatattgcacctccttacacaatttctatatatgtcatgcgggtttatattgcccgcagaacatgcgcctatacaaaacagtatcctgtccgtacaaaaatcgcgcggacaggtctgttttatgcggtttcaaaggcggttctggcagaaattctcagatttcatgcccacaacacaccatttgacattatacaccgctcattattcgtttgtcaagccctcttctgcattctgtgcggaagttttttcctcaaagctgctcaaagcggctacggcctcctggcttaaagagctgctcggcgccgtcggcgcaatttcaacattggtgtagcaatccatgccggtgccggccggaatcagcttaccgatgatgacgttctccttcaggccaagcagcgggtcaaccttacccttgatggcggcgtcggtcagcacgcgtgtggtctcctggaaggaagcagcggaaaggaaggactcggtcgccagagatgccttcgtgataccgagcagcgtcggcgtgaatgtcgcctcgcgcaggccggtctcgccgtttgcaattcttgcggcgatcttctcgttttcaagaagcgtgtcgttcttatcgacgagcgcgccgacgagcagcggcgtgtcgcccgcgtcttcaatgcgcaccttgcgcatcatctgacgaacgataacttcgatgtgcttatcgttgatatcaacaccctgcatacggtaggtacgctgcacttcctcaatgaggtaatcctgcaccgcctccgggccgctgatggcgagcacgtcgtgcgggttgacggagccttcggtcaagcgggtgcccttttcaaccacatcgccctcttttacgctgaggcgtgcgccgaacgggatgaggtagctgcgctggtcgccatcgccgcgaacgacaatgtggcggttctttttgacctcttcaaaaccgatcgtaccgccgatctctgcgatgattgcgagatgcttcggcttgcggctttcaaacagctcactgacacgcggaagaccctgcgtgatatcttctgcggatgcaacaccgccggtatggaacgtacgcatcgtcagctgggtacccggctcgccgatggactgtgcggcgatgataccaaccgcctcgccgaccgtgatcggctggccgtttgcaagggaggaaccgtagcacttcttgcacacgccgtgacgggtgcggcagttcaaaatagagcggatcttgatgtgcgtcgtgccgcggccgatgatgaggtcagcttcggcgtcgccaatcatcttatccttagaaacgagcacgttgccattctcgtcgcagtaatcgtcaagcaggtagcggcccacaatacgctccttaagcggctcaatggactcgttaccggatttgatctcgaacacttccagaccctcggtcgtaccgcagtcatcctgacgaacgataacatcctgagaaacgtcaaccagacgtctggtcagataaccggagtcagccgttctcagagccgtatccgcaaggcccttacgagcaccacgggaggaaatgaagtattccaaaatgttcaggccttcacggtagttcgccttgatcggaatttcgatcgtcttaccggacgtgttcgcgatcagaccgcgcatgccggccagctgacggatctggttcatagaaccacgggcgccggaatctgccatcatgaagatcgggttgtaacggtcaaggccgtcctgcagggctttcgtaacgtcgttcgtcgccttttcccaggtcttcagaaccgcgctgtaacgctcgccgtcggagaggaagccgtcgcggaaatctgcggtaatctcgctgatctctgcctctgcctttgcaagaatttcctgcttctgcggcggaatagtcgcatcgcagacagcaacggtgattgcgccgatggtggaatacttgtagccctgtgccttaatggcatcgagcatttcgcttgtgatcgccgtgccgtgctttttgatgcacttgtcgatgatcttgccgagctgcttcttgccgacgaggaaatcgacctcaaacttgaggatgttctccgggtcggtgcggtcaacaaagccgagatcctgcggaatcgggcggttgaagatcatgcggcccatcgtcgtatcgacaaggcccgtatatgtctggccgttgtactccacggttcttctgaccttgatcttggagtgcagcgtgatatattttgcgtcatacgccatgaacgcttcgtccatgttgcggaataccttgccttcaccgatctctccgtccttatcgagcgtaaggtaataagaaccgagaaccatatcctgcgacgggaccgcaacagggctgccgtcggaaggctttaagaggttgtttgcagccagcatgaggaagcgtgcctctgcctgtgcttctgcggaaagcggcacatgcacagccatctggtcgccgtcgaagtccgcgttgaacgcggtgcagacgagcggatgcagcttaatggcgcggccctcaacgaggaccggctcaaacgcctgaatgcccaggcggtgcagcgtaggtgcacggttcagcatgaccgggtggttcttgatgacaatctccagtgcgtcccaaacctcgctcttcgcgcgctctacggcctttcttgcagccttgatgttgccggcggcaccggtctcgacaaggcgcttcataacaaacggcttaaagagctccagtgccatttccttcggcaggccgcactggtacattttcagctccgggccaacaacgataacggaacggccggaatagtcaacacgcttaccgagcaggttctgacggaagcggccctgcttgcccttcagcatatcggaaagggacttgagcgggcggttgtttgggccggtgaccggtctgccgcggcggccgttgtcgatgagggcatcgacggcttcctgcagcatacgcttctcgttgcgcacgatgatgtccggcgcgccaagctcgatgagtctcttcagacggttgtttctgttgataacacgtctgtacaggtcgttcaggtcactcgttgcaaagcggccgccgtccaactgtacgagcggacggatatccggcgggataaccggcacggcatcgaggatcatccactccgggcggttgccggagatgcggaaggattccacaacctcaagacgcttgagaatatgcacgcgcttctgtccctgcgcggtttcgaggtcttttttgagctcctcgctgagcttttcgcagtcgatatcctcgagcagcttcttcacagcttcagcgcccatggacgcctcgaagtcgtcctcatatttttcacgcatgtcgcggtattccttttcggtgagcgtctgcatcttagagagctcacggacggaacccggatccgtaacgatgtaaagtgcgaaatacagaaccttttccagtacgcgcggggaaaggtcaagaatcagacccatgcgggacgggatgcccttaaagtaccagatgtgcgaaaccggcgctgcaagctcaatgtgacccatgcgctcacggcgaaccttgctgcgcgtcacttcaacgccgcagcgctcgcagaccttgcccttaaagcggatgcgcttatacttgccgcaatggcactcccagtcctttgtcggtccgaaaatgcgctcgcagtaaaggccgtcgcgctccggcttcaatgtacggtagttgatggtctcgggcttcgtgacctcaccgtacgaccaggagcgaatctgctcgggcgatgcaaggccgatctttattgattcaaaaacgttaaactccatatatgcgatcctttcctttcacccgaaattagaactcgtcgtcgatgccgtcaaacaaatcgttatcggagccttcaaactcatcatcgtcgccggtagagaagaagtcgtcctcttccccgtcttcgttctcgatggaatagccgtcgaaatcgccgtccgttgcgacgttttcttcatcaaagacctgatcgcccggggtgagacccacatcatcgtcatcgtcgaagctctggcgcaggtcaatctcctcgttgtccttatccagaaccttgatgtcgaggccgagtgcctgcagttccttgatcagaacgcggaaggattccggaatgcccggcttcggcacgttctggcccttaacgatggcttcgtaggtctttacacggcccacaacgtcgtcggacttcaccgtcagaatctcctgcagggtgtaagccgcaccgtaagcctccaatgcccaaacttccatttcgccgaagcgctggccgccgaactgcgccttgccgcccaaaggctgctgggtaacgagggcatacgggccggtggaacgggcgtgaatcttatcgtcaacaagatgatggagcttgaggtagtacatgtagccaacggtaaccgggttatcgaaatactcgccggtacgaccgtcacgcagacggaacttgccgtcctcactcatgcccgccatgcggaagcactcgcggatatccgcttcgtgtgcgccgtcgaataccggggtcataatcttccagccgagtgcgtttgccgccatgccgaggtgaacctcgagaacctgtccgatattcatacgggacggaacgcccaacgggttcagaacgatgtcaagcggtgtaccgtccggcaggaacggcatctcttccatcggcaaaatgcgggaaacaacacccttgttaccgtggcggccggccatcttatcgccgacggagatctttctcttctgtgcgatatagcagcgcacgaccttgttgacgccggggctcagctcatcgcagttgtctctcgtgaagaccttaacgtccacaatggtgccgtactcgccgtgcggaacacggagggacgtatcgcgaacctcgcgggccttttcaccgaagatggcgcgcagcaggcgctcttcggcggtcagctcggtttcgcccttcggcgtgaccttaccgaccagaatatcgccggcgtgaacctccgcacccacacgaatgatgccgcggtcatcaaggtcgcgcagcagatcttcgttgacgttcgggatgtcgcgggtaatctcttccgcgccgagctttgtatctctggcctccatctcatactcttcgatatggatggaggtataaacgtcgtcgcgtacgattttctcgttcagcaggacggcgtcctcgtagttgtagccttcccaggtcatgaagccgatgagcgcgttcttgccgagcgcaatctcgccgttcttaatggccgggccgtccgccagaacatcgcccacttcaacgcggtcgccgcggttgacgatcgggacctggttgatgcaggtgctctggttggaacgcatgaactttgtgacgacatagtcgtcgatatcgccgttatcggtcgtcacgcgaatgaggtctgcgctgacgctcttaacgacacctgcgcgttcgcacaggacgcagacgccggagtcaacgcctgctttatactccatgccggtaccgacgatcggagactcggtgcggagcagcggaactgcctgacgctgcatgttcgcgcccatcagagcacggttcgcgtcatcgttttcgaggaacgggatcatcgccgttgcaacggagaagaccatacgcggggaaatatccatgtaatcgacgcgggtcggctcaacctgaatgaactcgcccttgaaacgtgcgagaacactgtcgtttgcaaaggtgttgtcttcattcagcttttcgtttgcctgcgcaacgatgaactcgtcttccacgtccgccgtcatgtaaacgacttcgtccgtgaccttgcccgtcgccttatcaatctttctgtacggcgcctcaatgaagccgtagtggttgattcttgcgaacgttgcaaggtaggagatcagaccgatgttctgaccttccggggattcgatcgggcacatgcggccgtagtgtgtgtagtgaacgtctcgaacctcgaagctcgcacggtcacgggaaaggccgcccgggcccaaagcggagagacggcgcttatgcgtcagctctgccagcgggttcgtctggtccatgaactgggacagcggagaagaaccgaagaactccttgatcgctgcaacgaccggacggatattgatgagagaatgcggtgtaagggattccatatcctgaccctgcagcgtcatgcgctcgcggatcacgcgctccaagcgggagaaaccgatgcggaactggttctgcagcagctcgccgacggaacggatacggcggttgccgagctggtcgatatcgtccgtaaagccgaggccgacagcaaggcaggtcatgtagttgatggaggagaaaatatcatcaatgatgatgtggttcgggatcaactcgtcatgacgtgcggtgagctgctctttgagcttctcttcgtcgtcgccgcacgcttcgagaatctcggagagcactgcgtagcgcacacgttcgttgatgccgcactctgcctctgcatcaaaggaaacgtattttgcgatatcgaccatgccgttcgagataaccttcgtctccttgtcgtcctcaagggcaacccaggcggtggtcacaccggcgttgtcgatgtcttcggcaagcgcgcgggacacaacggtgcccgcctctgccatcacctcgccggtcgccgggttgacgatcgggcgggaaagctgacggccggtgattctgccggcaaggttcagcttcttattgtacttataacggccgactctggagaggtcgtagcgtctcgggtcgaagaacaggccgttcaaatggaactgcgcgctttcaaccgtgggcggctcgctcggacggagctttctgtacacctcaaagaggccttcctccatggtgtgcgtggtatccttatcgatagtcgcaaggatgcgctcgtcttcgccgaagtattccttgatctcttcgtcggtgccgagaccgagtgcgcggataaacgcggtcatcgggagctttctgtttttatcgatacgcacgtagagtacgtcattcacatcgttttcgtactccagccatgcgccgcggttcggaatgacggtggaagagaaaagctgtttgcctgttttatcgtactccatcttataatagacgcccggagaacgaacaagctgggaaacgataacacgttctgcgccgttaatcacaaaagtgccggacggtgtcatcagcgggaaatcgcccatgaagacttcagattccttgatctcgcccgtttccttgttgagaaggcgtgcagtgacgcgcagggccgccgcataggtagcatcgcgctctttgcattccgttaccgtgtaattgggtttttcgtcgagcttgtagttcacgaagtccagaaccagatttccgttgaaatccgtaatgccggagacgtcgtcaaaaacttcctttagaccttccttcaggaaccagtcgtaggaatttttctgaatctcgatcaggttcggcatatcgagaacttcattgatgtgcgagaagctcatgcgtgtgttcttgccaagctgtaccggcttaacattcaccattgactcaaccactccattcttagtatttgacccgtgtttttaagcaaaatcacttaaaaacggcggaaagaatatccgttcatgtgaattttatagattatgcttgattatttttcggaactgtgttataatgcagatcagagaaagaaatggcatatctatccatgatgatacattgtaatatgatacaccgtatctgtggatttgtcaagccttttcccgaaatttttcgagttttattccctttttcttttctcaaattccaaagcagaataaattgaattttgacccgtatacccgatcgcacatggaccttgtaaactgcaatcgggctttatttttatccgctgctaatcattttaatttgaggaggaacactgtatgaaaaagcatttcgcaaagcagattttcgccgctgcccttgcaatcagcttcgtgtgcgggctttcggcatgccgtgaacgcgaagaagagcaactctcgttaaagccggtgatttatctttatccggaagaagaaacggacgtctcggttacgctcgcgtacgacggaacgctcacttgcacctacccgaattacaaaaccggctggcatgtttcggcgaaacctgacggtactctgacggacgaggacggccaaacgtataactacctgtactgggaaggcacggacagcgcggaatacgacctttcccacggcttctgcgtagcgggcagcgacaccgccgctttcctcgaaaatgccttgcgcgacctcggactcacccgcaaagaagcgaatgaattcatcgtgtactggcttccccagatgcaggaaaatccctataatctcatcgcgtttcagtccgactgctatacgcaggtggcgcagctggatatctcccccgcgcccgacacgctccttcgggtcttcatggcgtggaaaccgcttgaagagaaagtcgacattcccgcgcaaacgctcaccgctcccgcccgcgacggcttcacagcggtggaatggggcggcagccgcataaactgagccgtagctcttgcccgtgcagagtctcacggcgttcataccgcttaaaaacacgcaaaaccttcccggtttccaaacggaaacgaagccgggaaggtttttgttttgtttatgttgaattttggatgccgaagaaattaagttaaaaagcgaaagccgcttttaaaacgaatgattgcgttttaagtatgtacttgcctgtactttcacgcggattcgcttacgtttctgcctctttcccctcgcctttttcgtccgcctcggtatcctcgcaggcacagatggacgcgaacgtgtaggactccagcttattgcgcacaagctgcgagacctcaccgtagatgtgatgcaaacggcacgaggtgcgctggcagctgtacgcatcgccctggcagcgggaaatcatatacggcccctccaccgcctcgatcacgctgcgcagcgtgatctccttcggcgactttgcaagctcatagccgccctttgcgcccttatacgagcgcacgatgccgtccgaaacgagcgtgcgcagaatcttcagcgtaaagcgcagcgtgacgcttgtgcgctccgagatcgttttggcatctgcgcgcccggggttcacggccaaaaattccacgatgcggactgcgtagtccgcttccagtgtcatgtgcatggtatgtgcctatcctttcgggatcaatccagaaaatccttcagcttcttgctgcggctcgggtgacggagctttctgagcgcctttgcttcaatctggcggatacgctcacgggtgacattgaattccttgcccacttcctcgagcgtgcggcttctgccgtcttcaaggccgaagcgcaggcgcagcaccttttcctcacgcggggtgagggaatcgagcacatcgccgagcgtttcgcgcagcagcgtatgggaagcggcatctgccggggccggtgcgtcgtcatccgggataaagtcgccgaggtggctgtcctcttcctcgccgatcggcgtttcaagggagacaggctcctgcgcgacgcgcatgatctcgcgcactttatcaaccggcatatcgagctcgtcggagatttcctccgcggtcggctcatggccgctcgtgtggagcagctggctggagaccttcttcaccttattgatggtctccaccatgtgcaccgggatacggatggtgcgggcctggtcggcgatggcgcgcgtgatggcctgacgaatccaccacgttgcgtaggtggagaacttgaatccctttgtataatcgaacttttcaacagccttgatgaggccgagattgccctcctgaatgaggtcaaggaactgcatgccacggccgagatagcgcttcgcgatgctgacgacaagacgcaggttcgcttcggaaaggcgcttctttgcggcttcgtcgccgtccttgatggcgatggcaagacgcacttcttcttcggaggaaagcagcggcacgcggccgatctctttcaggtaaactttgaccgggtcatcgatggcgacgccttccatgcccatgccggcgtcaaaatcgtccgtatctgcgccggatactttggaaaggtcgatgtcatcaatctggatatcgctgaagtcatcgataatctcaatgccgtgcgattccagtgtatcatagaatttttcaatgtgctccgggtcgaaatccaattcgccgatggcgtcgaggatctcctttgtggtgagctggcctttgcttttgccgagctcaatcagatcgcggatcacggttttcttatcgggtgctgccatagtttatcatacctttcctgtgttttcccttattccctcggcagcgtctgcacgctgcctttttatctccattctgttttaaagcataacgttcctattttttctgtttgcgcagtgcatcgagctgcgcctgcaggtcggcgaggttcgcaccacgcaccttatcggtatcggtcaacgcgccttcgctcaaaatgatctgcacgtattcttccgcgtctttggcggtgatgccggcgttttcctgcacaatcttcgcaaggcggcccatttcgtccggcgtgcattccgccgaaaagtctgtaatctgcggcgatgtgaccgtttcttcgtttataatcttgcccaggaggctctgatataaccggcgattgaacgccgtcacgaatttttcgggcggcacgcggcggttcaggctctgtgcgaggtcattattgtggaaaaggcacgcgatgagccgctcttcggcgttggccacgcggacatagcggcgcttttcggggtttacggtatcgcgccgcgcggaaagctgctccgtcatgtccctttgctgctgccgctgcgccgcacgcgcttttttgcgcacggaaacagacatctgctgcaaaatggcgtttttgtcaacattcaattcctgcgaaaggcggctgacgtacacgtcgcgctcaatggcgttttcaaggcccgccagcagctctacggcggccatcaggtattgaatacgcccgttttcgttgcttaaatcatacccgcttttcagctttgcaaggcggtattccacatcgttgccgctttgctcaatgagcctacggaaacgcgccgcgccttcatcaccgcatgcgttgatgaactcgtccgggtctttgttgccgggcacggccatgacgcgcaccaaaagccctgcgccgcgcagaatgggaatggcgcgctgtgcggccttttgaccggcttcgtcggaatcgtagcaaatgacgacctctttcgcatagcgggcaatgatgcgcgcctgctctgcggtgagtgccgtgccgagcgacgcaatggcgttttcaatgcccgctttgtgcagcgagatgacgtccatatagccctcagctaaaatgatgcggtcgttttcgagcgcgttttttgcaaaattcatcgcgaaaagaccgctgctcttgtggtagaccggggtatccgatgtatttatgtacttcggcttttcatttgtcaaaatgcgcccgccgaacgcgaccacgttgccgcgcagatcaatgataggaaacatgacgcgtgcgtggaaacgatccatcgcgcggccggagcgcgtctccaccgcgacgttcgccgcaatcatctcgcgctcggaatagcccttggagcgcaggtgattaacgagcgcaaagcggctttccggcgcccagccgagcccgaaatggcggatcattttcatgggcaggcgtctgcgcgcgaaataatcaagccccggcttaccctccgggcttaaaagcgcgctgtggaaaaagcgggcggattcgcggttgatttccaacacgcgctgacgcaggcggctcatggaatcgtccacgccctgctccggcatttgcagccccacgcggtccgcgagcattttcacggcctcgatgtaatcgagattttcaatcttacggatgaatgtgatgacatcgccgcccgcgccgcagccgaagcagtaaaacgagttattctccgggtagacgttgaaggacggtgatttttcgttgtggaagggacacagtcccaccatgtttttgccgcgccgctttaggttgacataggaggaaacgatgtctgtaatgtcgcagcgcgattttaagtcctgcataaaggactccggcaacggcattccaccgccccctttcgtgaccgccggcgcgatgccgttgggattacgggcaaagctcggagcaaaacgccctgatttttgccctcatagtattatatacgccgcaaacggcaaaattacttcttttattcttcaaattcaaaaaatttttttccgtcttctgtcacatcgacctgcccatttgtggcatccgcaagttttttgcggaatgcaccgagcagctcgggcgccaaatggagtttgacggtaactttttcctcaaagaccgtgtcgtccgtcacgccgccgcattccggaacaagcgatgcaacgcggccgtaccggccgtaatcgcaggtaagcgacaacagcaggcactcgcgcatggtaatgatctgtgccgcctgcagggcgatggacgcggtgtgcgaatacgcacgaacgagaccgccgcccccgagcagaatgccgccgaaatagcgcgtggcaaccgtgacgacatccgtaacgccgcttttgcgcaggacatccagcaccggcataccggccgtgccctgcggctcgccgtcatccgaaaagcgcatggtgccgtcgcgcaggatatacgcgtagacgttgtgactggcatcccagtgctcggattttttggacgtgatgaaatcgagcgcctcctgctcggtctgcaccgggcaggcatagccgatgaaacgcgatcgcttttccacaaactggtcctgcgcgtttttccgcacggttttgtactctgccatttttaccgctcccctctgttttgaaacgaacgcgatttgcctttggagaaaaaatgggcgatgcccgaaagagcaccgccctgaacgatccatataaatttacttcgtgataccgtagcgcttgttgaacatatcaacacgaccgcttgtatcaaccagcttctgcttacccgtaaagaacggatggcacttggagcaaatttcaacgcggatgtccttctttgtggaacgcgtgtgaatcacattgccgcatgcgcaggtaatggtcgtttcctgatagtccggatgtatattcttcatatctgtcacctctttcggttgatctgcggttagtcggttaacagcgaagttaacacataaacatagcgctaattatgttagcacaaaaaattctaaaatgcaaggtctttttcaaaaaaacagaaaacttttttctttttcttcccgaaagcatccgtttttttcgttaggcgccgatgtagcgaaggtattcttcgaggcaaaaggagagtctgcggatgacggcggcgtgctctgtgccgacatagcgcaggataagatcattgcgtttaaggccggtttcgtcctcttttccggcgggatagcggaacacaaagccgtaatgcgccatgtttctttgcagccagccgtaggtatccgttgtcgaaaacgttgcggggtcgtcctgcacggtgacgcacaggccgctttgcaggtcgcttgtgccgggcgcggacacggtggattttgcgtcttcgcgcgccataatcttggtggaacctgccgcgataaggcgctcgacctcggcgttataaagcgcttcctgctctgcataggacacatagccgccggaaaacttgagcgtgacaccgtctgactttgcggcatcgcacagtgcggtgagtgccggcacaatgcgagcatcgaccgtgacgctgtcaaactcggcggtctcctcgggggcgaaatccgcatccgcagagtggtcttcgttgatgacgaacagattcacgctgtcctcgagcacgggcaagtcgttttcctccgtgcttgcagcgggggacgcggtgggcagtacggtggcctgcggcagggaatcctccggatcttcgggcgggaaaagcaccggcaaaccccacatgacgaacagtgcaagcgccatgaaagcggcggcgcagataagcagaatgcccgtccaacgctttaggttcataatgcgctccaaatgcaatggacgcggcttttggatggggctgtatttttttcgtttccgcacggtgctctcccctttctttcggtatcttttactattatatcggatgacgggaaaaaagcaagtcgaattcctttacaacagaaaaacgcccgagccgtgaagcccgggcgctgtgcatttcagttaacgctattttttgaagaattacttctttttgcttttacgggagggaatctcggtggtttccgggtctacctttcccatttcggaagctgcactgctaagaccgtcctcgccgctgctgagcttgccgttattgacgatgaggttcgtgacaatgccgacgatgagggcaacagccaaagacgtgatgttcagcagagcgccgccggtgatgctgttcgtgccgaagccgaagtacaaaccgccgatgccgcagacgaggatggagctgacgacgaacaggttcttactgttgccgagatcaacacggtggagcatctggagaccggaaacggcgatgaagccgtagagcgcgatgcacgcgccgcccatgacgcacttcggaatggagttaatgagcacgacgaacggagtgaagaaggaaagcaccatgcagccgagtgccgcggtgaggatggaaacgacggaagcgttgccggtgatggcgatgcagccgatggactcgccgtaggtggtgtttgcacagccgccgaagaacgcgcccacaatggagccgaggccgtcgccgatgagggtcttatcgaggcccgggtctgcgatgaggtcgcgattgacaaccgtgctgaggttcttgtggtcagcgatgtgctgtgcgagctcgacgacgccgatcggaatgtaaatcatggcgatgttgccgatggcagccgcatcaagcggatactggccgttcgtctcgattgctttgaggaagaagaacttcggataatcgacgatgctggtgatgctgaatgtgccgaatgcatcgatgaaaggctggaaggaaaggagcttgaggctctctgtgcccgttgccatgccgatgattgtaaagacgagtgcaagcgcatagcccgcgccgatgccgacgataaacgggatgagcttgacggttttggagcccttaacggacgcaatgacaatcatgaagaaggtgaagatgccgcagatgatggcagcccagttgtaggtctcgccgtatacgacagctgcagcgccgttgcccatgatccagcttgttgccgtgccggagagggacagaccgatgagcgcgacgatcggcccgatgatgacggccggcatcagcttattgacccaaccggagccgacgaccttgatgacaagaccgatgatgacgtaaacaagacctgcgaacgcaacgccgatgagcatgccccagtagccgtaattctgaccgattgtagccgcatacgcgccgaggaaggtgaacgaggagccgaggaataccgggcttctgcgcttggtgcagaacaggtatacgatggtgccgatgcccgcgccgaacagtgcggctgcggcgtctgcctgcaggccgtagctggtgacaagcagcggtacgagcagcgtagccgccatgatggcgatcatctgctggaatgcgaagaccagtgttttgctgaacttcggcttatcttcgatgccgtaaatcaacttcatgaaatcatttcctttcttccgaaccgtggtttcatttcttaccccaaaacacgttctcttctcccctatgctcttccgagcataaagaaaagctctgcctgtaaaatgggcagagcttgagccttgtcagcacgccgtctgtaaagacgtattaagagtcaatcttgccaatatcacagtatcggggttaaagatcgtatttcgttttccaacgctaaactatagcacaacattcgacgaaagtcaacgtaattcgcgcacttgtgaatagtttgtgaatattcatcaaaaaaaggcagcacaatacagaaaaagctctccgaaccatgcgaagagcttttatgtttacaaggatcaccggtttttattcggtttatagctgactgtgccgcacaggcgatcgcctgcgtcgccggctgcggtgggaatgtagccgttctcgttcagcgggccgggtgcgtagtttgccgcgtagattttgacatccgggtgcttttcatacagcagcttgatgcctacctcggacgcgaaaatgcacatgaacttgatgttcttgcagcctgcgtcctttaaaaactggatggcagcatctgcgctgccgcctgttgcaagcgccggatcaacaacgacgacggggccgtctgcggtatcgaccgggagcttaaagtaatacgtcatcggctttagggtttcctcgtcgcggtaaaggccgatgtgaccgacctttgccgtgggcgaaagctcacgcaggccgtctaccatgccgagaccggcgcgcagaatcggaacgatggtgaaatcctctgcaagcaccggagtaatgatcttctgcagcggcgcctggatctccacgtccttcgttttgagctccttgagtgtctcatagcccataagcatagcaagctctttgacgagttcgctgaattccttggtgccggtgttaacgtcgcacaggtggctgaccttgtgcttgatgagcgggtggttgaaaaccgtaagattggaaagatatgcttccatgtttgaccttccttagtccgtaagacggcgcaccgccttgtttcgtttattttcaaagagtatcatagcacacgctttgacaaaaatcaaccgaaagagacgcgtcttgacggaaaagcgccgaaatgctacaataaattgaagagttaagaaaaggattgacaagcatgcctatgaagctgaaagcccagctgatggacgatgttaccgtaaagcgcgctttgacgcggctttcttatgaaatcattgaaaaaagccgcgacctcgaaaacgtggtgctcatcggcatcaaaacgcgcggtgtgccgcttgcggagcagattgcggcgaacatggagacgcacaccggtgtaaaggtgcaaacctgcacactggatattacattctaccgtgacgacctgacaaagcggcacgacctgccgactgtgaacacgcagacacttccggtcgacctcaacgacaaggaagtcattttggtggacgatgtgctgtttacgggccgcacggtgcgcgcggcgatcgacgcggtgttccgtttcgggcggccggcgcgcattcggctggtcgttttggtcgaccgcggtcaccgcgagctgcccattcgccctgattttgtgggcaagaatatccccacctctctacgcgagatcatcaccgtgcatttggaagctgtggacggcaagacgaacgtggaaatctacgagcaggacgagaacgaaccggaaatctgcgggcaatgacccgcttttagtgcaaaaatcaaattagaagaaggtataaacatggctgtaattttggcaagtagttgccttttgggctgcgaatgccgctataagggcgacggctgcaagtgcgatgcgctcattaagcttgcagaaagcaacacgatcatcggcgtatgtcccgagcagatgggcggcctgcccacgccccgcgacccggcggagcggcagggtgacaaggtgatctcctgtgcaggcaaggacgtgacgaaggcgtacacaaaaggcgcagagacggcgctgtactttgcgaagctgaaccacgtggattttgccgtgatgaaggcgaaaagtccgtcctgcggcaagggactcatttacgatggcacgtttacgggcaacaagattcccggcaacggtgtaaccgtggagcttctgaacgcgaacggcatcccggtgtttacagaggacgaattggatcagttgccgctgtaaagcgaaacatcttaacacaaagaattgggcctgctgcgctttgcggcgggctttttgcttgaagatataaagaaaagctgtgcgtaaagttttgttgctttacacacagctttttgaattttatgtaatgctatttcgctttacagcttatttctcgtcgaagaacgccttgaagcccttgtaggccatgtagacatcgagcttggagacaacctcaaacggtgcgtgcatggagagcaccggcacaccgatgtcgagcacgtcgacattgaggttcgcgatgaactttgcgaccgtgccgccgccgccctgatcgaccttgccgagctcaccgatctgccaaagcacgcctgcatcgtcaaacgtgcggcggattttggcgacgaactctgcgttcgcgtcggacgtaccgcccttgccgtgtgcgccggtgtacttggctatgcccagaccgccgttgatgtaggtggagttctgtgcctcgtaaacggaagcataatgcggatcatatgccgcggtgacgtcggcggaaatgcaggtggacttggagagcacgtggcgcggctcttcaccctctgcctgcgcgaggtcagcgatgaagtaacgcatgtactcggagttgaggcccgtgttgccgtcgctgccggtctcttccttatcggtgagcacagtgacgacggtctgcaccgggttcttgcagttgaggatagcttcaagtgccgggtatgcgcagacgcggtcatcgtggccgtaagcgccgacgaggctgcggtcaaagccgatatccaccgccttgaacgccgggacgaactcgatctctgcggagatgaggtcggcttctacgatgccgtacttctcgtttaagagacgcatgatgttcagcttatatgcatccttagcctcctcgtcgcgaaccgggcggctgccgatgaggatgttaaggtcttcgcctgtaaaggcagtacccagcggctttgtagcctgatcctgaccgaggtgcggcaaaatgtctgtgatggtgaactgcggatcgcccgcttcttccccgatgcagaccttgatgaccgtgccgtcgctcttcacgacaacgccgtgcatggcgagcggaatcgccgtccactggtactttttgatgccgccgtagtagtgcgttttgaggtacgccatctcggaggattcataaagcgggatgggctttaagtcgagacgcgggttatcgatgtgtgctgcggcaatgcgaacgccgtttttgcagccctctttacccatgacggcaaggcaaattgctttaccgcgattgttgtaatacactttgtcgcccgccgcatacttgtgcttcgggtcgaacggcacaaagccgtgcttttctgcagccgcgaccgcgtactcaacggattcgcgctcggttttggcgctgtttaaaaatgccttgtagccttcgcagaacttatctgctttttcgatcttctcatctgtgaccttgaaaaagccgttcttgcgcgggttgaggagcatttcggacagctcttttgcggatttttccgctgcttttttagccattttcaattcccccatacaatttttcgtaagtttctttatactgaaggactttctggacgtaaagacgcgtttcttcaaacggaatttcttttaaggtcactccgtcttcggaatatgcggggtccgaaagccacgacgtaacgtttcccatgcctgcattgtaggcgcagaccgctgtggcgaggttgtcgtactcgtttaaaagcacgcgcagcagtgcacagccgtatttgatgctgatttcggggtcgagcaaagcgcttgcgtcatattccccgccgatatgcgtttgcatccagtcaaacgtttcgggcatcatctgcataagcccgagcgcgccgaccggggactccgcctcggggtcgaaatcgctttccgccttgatgacggcatagacaaggctttgcggcaagtcgtactccttcgcttcttttttgacgatggattcgtacttgcgcgggtaaagcatgtggtctacatcgggatgcagcctttgcaccgcgaaaacaacgagcacggcagctgcaatgccggcgataagaatccatggccacaagggcttctttttggacttttttaaatgtttgcttctcttattcaatcggattcaccggggtgtgcgcagccaagcactgcgagcatattatccatattgtccgccgaaacagcgacggtgttatcgagtgtgtaatcggagcggtcgatgtaaaaatcgtcgctctgctgggcgtgcatacgcgtcagggcctcctgctccgtgagaccgtcgcggcggcagatgcgcccaaggcgcacggtttcatccgcaagaacggagaccacacggcggcaaaggcgatctgcaccggcttcaaacagcgtcggagcgtcgagcacgatgacctttgcatctttatatgcggcaatctcctttttgagacgtgttaaaatcacgggatgcgtgatggcgttcagcttcgctttgccctcttcgcttgcaaacgcgaggtttgcgagacggcggcggtctaaactgccgtcttcttttataatagcacggccgaacgcattttgcaactccgtaagacatgttcctgcataaagagacggatcgtgcgtaacggcgtcgcagtcgatgatgacgcagccgcgcgccttaagctgctttgcgaccgtcgatttgcccgcgccggtctggcccgtaaggccgatgacgagctgctcgttcggcgttacgatgcggaacgcacaagcgcggatcaaacggttataaaccgcaaggcctacgccgcttttgcgcggcatacgggcgtaaacggtctttgcaccgatctcatcgaggtgatggagcgacgtgaaaagcccgtgcgcctgcgaaagggaatctgcgacgctgccgtagggcacgcaccggtttttgaggtacggcacatcttcgttaaagcaaagtgcagctgcttcggggtgcgtatgcaaaaacgcggcgtaatcttcggcggaagcgtccaccatgtagacgtccgctttcggcgcgtagtgcttgtatttcatgccgggcgaggcgaccttggcgttttccgcgggcttttccagcacggcgcggtccacgtctaccctgccgagcacgcggcgcagctgctctacggaaataccgcccgggcgcagcacgcgcggtacctcggtgacgacggtgataacggtggactccacgccgacctcgcagtcgccgccattcacgatgccgtctacgcggcccatgagatcatcgcacacatgcgggaatgatgtggggctgggcaggccggagagattcgcggacggcgcggcaagcggcacgcctgcggcgttaatgatcgcccgcgcggtgggatcggatggcatacggacggcaaccgtatcgagaccgccggtcgtctgcatcggcacaagcggcgattttttcatgatgatggtaagcgggcccggccaaaaggcatctgcaagctttttggcagcttcgggaatctcttcgacaagcgcaggcaattctttgatatccgcgatatgcacgatgagcggattatccgacgggcgacccttcactttgtagatctgtgcggagacggtagggtccagcgcattgccggcgaggccgtagacggtctccgtggggatagcgacaaggccgccgcggcgcagaatcttccccgcttcttttatatcctgttcgtttttttcatccaataatcgcgtatccattttcatccgttctccatgctctctttcaatttttcggcgcggtctgcggcgatgagtgcgtcaatgatttcatcgaggtcgccgtttaagacgtcgaacaggcggtagattgtcaggcctatgcggtgatcggtcacgcgcaactgcgggtagttgtaggtgcggatgcgctccgaacggtcgccggtgccgacctgacttttgcggtttgcggcaatctcggcgttttgcgccgccaccttagcgtctaacagtcgggcacgcaggacgcgcagggctttatctttgtttttgtactggctgcgctcgtcctggcactcgacgaccgtgccggtgggcaggtgcgtaacacggatggcagacgacgttttgttgatgtgctgcccgcccgcgccgctggagcggaatgtgtcaatctttaaatctttcgggtcgatctcgagctcgacctcatcggcttccggcaaaacggcgaccgtggcggtgcttgtgtggatgcggccctgcgtttccgtttccggcacgcgctgcacgcggtgcacgccgctttcaaattttaatctggaatacgcgccgtcaccgtcgattgtgaagctgacttccttaaagccgccaagctccgtttcattcaggctgacgatctccgttttccagccgcgcttttcggcgtacatggtgtacatgcggtaaagattataggcaaacagtgccgcttcctcgccgcctgcgccgccgcgaatttccacgataacactgcggtcgtcgttggggtcgcgaggcaataataaaattttgagctcttccgagatgctttcgatatcgcttttggcggcgctcatctcgtcgctcgccatttggcgcagctctttatcggcttcggagtcgtttaagatcgcttcggcgtcctcgagcgacgcttcggccttttttaaggcgcggtatttttccacgatgggttcgatttctttgtgctccttcatgaggtcgcggtagagattgcggtctgccgcaacggcgggatcatagagcttcatattaagctcttcatatcggttttcaaaaaccgagagattttcaaacatagcaaagcttcctttcagacagatagttaaatgaaacggtctgagaggcgctactgctcgctgccggcactttcgcgcacgatcttgcgaatgttcttttcacacttgtggcggggcaccatgacttctctgccgcagccggtgcagcggattttaaaatccgcgccgatgcgcagcacttcaaacacgtttgtcccgcaggggtgcggctttttcatttgtaatttgtcgcctacccgaacatccatggtacagcctcctttatcgtgtattgggcgcgaatgctcccttgaaaattcagtatagcacaatgctgtattgatgtcaaagcaaaagaccgcctgcgcgggactttcccttgcagacggccttttcggtttctattttattccaaacgctttgtgaaaacgcttttacgctgcgatgtgaatgccgctcttcttcagcgcgaaactaagggcggtcgctacgccgtaagccgccgcaacggagacgatgtccttgacgagatacggcacggaggccacaaggaacgccgcccacgggccgttgccggagatcatgccgaactgaatggtgccgcacagatggcaagccgcaagacccgcaacaccgagtacaatggcgagcacacggtgcggcatttttgtgccgagaccgcacagcgcagccatgggcaggaagccgtagatgtagccgcccgcgagaccgacaagcgaaccgaagccgccggagaagtttgcaaacaccggcagaccgacagcgccgagcacgatatagacgagcacggcaagcgtgccgcgcttacagccgagtgcatagccgcacagggcgaccgcgaaggtctgtaaggtgaccgggatgccgctcggcagcgggaacgaaatctgcgacaaaacggcgagcacggcggcgaatacgccgaccataacgatattggtgattttctctctgttgctgttcatgttatttacccctattcatttcggaatacggcacactaagcagtttattcggctttcgggtttgcaaagcccttgtggatctgcacctcgcctgcggaaaacgcgcgctcctctccgctatcgagacggacgagcaggtgcgcttcgtcgctgataccggtgacgacaccgcggtacgtctcctccccgagcgagaacgtgatggcgcggccggtgaggaacgagtggctgcggtacgattcgatgaacgcgttcgagccgaggttcttatacagcgcgaaaaagcggctgatgacggcagccgaaatgcgactgcgcatctccacgggacacgggccgtcgaaaatagcaccggcgatggagcgaatctcctccgggaagccctcttccggcacagcgatgttgatgccgatgccgagcacggcccagttgagaccgccgttttcaaaatcaacggaagcttccgttaaaatgccgcagacctttttctcgttgaggtaaacatcgttcacccatttgatttgcgggtttagccccgtaacctgctcaatggcttcgcacacggcgaccgctgcggtagtcgtgatgaaaagcgatttttcagcggtgcagtgtgggcggagcagcagactgaaataaatacctgtacccggcggcgatgtgaagtgccgaccgagcctgcccttgcctgccgtctgcgattccgcaatgagcacggtgccctccggcgcgccctgctctgcctgtgcctttaaaagcgtattggtggaggtgacttcggtctgcacctgcaagtaaaccggcatatcggtatcgaggaaccgtgagacactctgcacggtgagcacatcgctttccggcgccagcgtgtagccgcgctttggcacggcgcgaattttatgcccggcttcttcaagcttttggatggctttccacacggcattgcgggaaacgccgagcgacgacgcaagctgctcgccggagaggtattctccgcgatttttttcaagcgcgtctaaaactgcatcttgtatgcgcataaatttcctttccggcaaaaccggcagcgaaaatttcgtctaccagtttaccacacacaaagcgtttcgtcaacctaaaattagaattaaggtgacgaataacaaaacaccgattgaatggaaaagcaaaagcccgcacagcgcatggttttgctctgtgcggacaactattccattacttctttttcttgaagccgtccttcagcgaaacggagcggttgaagacaaggtggtcttctgcagaatccttgttatccacgcagaaatagccctgacgcatgaactggaagctctcgcccggcttcgcggttttgaggcccgcttccaccttgcagcccgtgaggaccttgagggaatccgggtttaaaagctctaagaaatcgcccgcatccgggtcttccacagtaaagaggttatcgtagaggcgaatttcggcgtcttcggcgttcttcgcgtccacccaatggatggtgctcttgatcttgcggccgtctgccgggttgccgccgcgggactcggggtcatactccgcatagacctcgacgacgttgccgttttcgtcctttttacagccggtgcacttgacaacataagtggtcttgaggcgcacttcatttcccgggaaaaggcggaaatagccctttacaggggtctccatgaagtcttcggcttcaatgtacagctcgcggccgaacgtaaccgtgcgggtaccgtcttcgggacggttcggattattctcgacctcgaacgtctcggtcctatcttcgggatagttcgtcaaaatgagctttacggggttcagaacgcccatgacgcgctttgccgtgaggttcaagtcttcgcgcaggcaatgctcaagaaagctgtattccacggtagagttcaccttggaaacaccgttgcgcacgctgaaattgcgaatggaggccggggtgtagccgcggcgtcgcaagccgcagatggtgggcattctcgggtcgtcccagccgctgacataaccgccttcgacgagtgcgcgcagcttgcgtttgctcatgaccgtgttgttgatgccaaggcgggcaaactcgatctgacgcggctttgcgggcagcgtgacgttgttgataacccaatcgtacagcggacggtgatcctcaaattcgagcgaacacagcgagtgcgtgatgtgctccatggcgtcctcgatggggtgcgcaaagtcgtacatcgggtagatgcaccatttggtaccggtgcggtggtgcggcatgtggttgatgcggtagatgaccgggtcgcgcatattgaagttgccggaagcgaggtcgatctttgcgcggagcgtcattctgccgtcttcaaactcgccggcgcgcatgcgggcaaacaggtcgagactctcctccatcggacggtcacggtacgggctctgcgccggggtggtgaggtcgccgcgcatttcacgcatctggtcaggcgtgagctcgcaaacataggcaaggccctttttgatgagctctacggcgccgttgtacatatcttcaaaataatcggaagcatagtagaagcggtcttcccaatcgtagccgagccagtggatatcttccttgatggcatcgacgtactccacgtcttcctttgtggggttcgtgtcgtccatgcgcaggttgcagatgccgttaaagcgctctgcggtgccgaaatcgacgtaaatcgccttggcgtggccgatgtgcaggtagccgttcggctccggcgggaaacgggtgtgcaccttcatgccttcgcagcggccgccttctgcgaggtcttctataataaaatcatcgataaaactgctgctgatctcctcggagaccgcttcgtttttgatctcttcactcataatttgtccatacctttcctaatatcaggtttttcctcttgctttatgcgttctcgatcttttgaaggccgagctgtaaacggcgcagcgcctcctctttgccgagcacggcgagaatttccatagcgccgccgggagtaacggtctggcctgccgccgcgatgcgtaccggccacagcagagtgccgtttttcacttcgaggctctgtgcgagggcaatgagtgcatcgtggatggtatcaacctgccagttttcaatggcggacagcgtctcgatggcggcacgcagcatgacgggcgcgttctcgagcgttgccttgctctttttgtttatgaagaggtctgcggaatattccggaagctctttgaagaagccgagcaggctcgggatttccttaaacttcaaaatacgcggctgcaaaatggcgtcgagcacgtcgtacggcttttctgcgtcgccgaaaatctctttgtagtacggcatcgccgcggtgcggaactcttccccactcatcttgcggatgtattcgccgttgaaccacaggagcttatcgtaatcgaacacggcgggcgatttgctgatgccgtcgatggagaatgcttcttcgagctctttcagcgagaaaatttcctggttatccttcgggcaccagccgagcagcgcgatgtagttcgtgatgacaggcgcgaggtagccgtcttcgaggaggccctgaaagcttgtggaaccgtggcgcttcgaaagctttgagacggagccgtcttcgtttttgcccatgatgagcggcaggtgcacataaatcggcttttcccagccgaacgcgtcgtagagcatgttgtacttcggtgtagaggtgaggtactcgcagccgcgcacgacgtgcgtaatgtgcatgaggtggtcgtcgatgacgtttgcaaagttgtaggtcgggtagccgtcggactttaaaagcacctgatcttcgatctctttgttttcaatcgtgatggtgccgtaaacggcgtcttcaaaggacgtggagccctcgagcggcacacgctgacgaatgacatacggcataccggcgtcgaggttcttccggatttcctctgcgggcaggtcgcggcaatgacggtcgtagccgccgaactcgccgtcctgatgaatggactcgaggcgctctttggtgcagaagcaatagtatgccttgccctcgcgcacaagctgctctgcgtagggtttataaatatccttgcgttcgctctgtacatacgggccgtattcgccgccgatgtccggtccttcgtcatgctgcagaccgacttgctgcagtgtattaaatataacgtctgttgcgccttctacatagcgctcctgatctgtgtcttcaattctgagcacaaacgtgccgttttgggacttcgccaccagatactcgtacagcgccgttctgaggtttccgacgtgcatgaaaccggtggggctcggcgcaaagcgtgtgcgaaccattaaaacaacctccttggtttttcggtgcgttgctatccatgccgccggcatgaaaaaatactacaccattatataatgttctattatatatctgtgcgcaaaattttgcaataaaaaaacgggaaaaagcgccatctttttcccgttttctgttcttaattgcccttgaggaacgccacgtactcttcaaggcacatgttaagctcgttcatgcgctgcgcgtgctccttgccgacgtagcgataatgccacggctcgtaatcgatgccggtgatgctctctttgcctttgggatagcgctcgacaaagccgcattctgcagcgtgctcctgcagccatgtgtaggcttccgtctcgcggaaatcgtcttcaacatcattgaaatcgaccgcaaggccggtgtgatgctcgctgtaccccggcgcctgaatggtgatccgcgcgtcttcatacgctttttcataggtcatgccgtctgccatgcggcgctgcacggcgcgatccagcacgctttcctgctcctccacgctgcgatagcccgaggcaacccacaaattgatctcgtcgttatacgctgcattgataagcgccgtgagctccgggtacattttggagttgacggtgatggtatcgaacagcgtcggggtcatttggaaatcgtccggcagcggcacttcgctgttcacaagcacaagccgccaatcgccgagctgctgaaaggcagattcgggagcagaggtcgttttagaaagcacacttgctttgtctgaaatgttctccgcagcggtgcccggcgccgcttccggcgaggcagcagcttctatgggctctgcattttgatgcggcatggcaagcagcgctgtgatgatcagcacagccgcaatgcaccctgccccactaagcaaaagccgtgcacgcgatttcagtacacgtgcgggaatcctgttatgcttcttccgtttttgcggctgttttaatctgtaatgtccaccttgcggccctgccatgtgctttgccacgttcatgctcccttttctttcgtatcttctattgcaagtataccacataactggtatactaatccatagtttctacattgttttttcatctttttttcattttgaaggagtgaccttgatgaaaaggatctttatgcgcggcaatcccggcgattttgcaaattatgtggcggcgctgacggcttgcggcgcggaaccggtaatctcgatgacgctttccgacgcagacacctgcgacggcctgctgatccccggcggcgccgatgtaaatcctgtgctctatgggcaggaaaacacggcgagcgaaggcatcgatgacagccgtgatgcagacgagattgcgcttgcaaaatgcttttttacagcaggcaagccggtattcggcatttgcagagggcaccaagtgctgaacgtggcattcggcggcgacctcattcaggatgtgccggacccgcagcaccacatggcgacaaaagagaccggcgacgccattcacacggtgcgcgcgcagcatgatctgatgcgcgaattttacggcgaagaattccccgtgaacagtgcacaccatcaggccgcaggtaagctcggcgcgggacttatccccctgtgcgtcagtgacgacggcatcaacgagggctttatccatgaaaacggcaaggtgatcggcgtgcagtttcacccggagcgcatcggctttgcgcaccgccgccccgatgcagtgaacggcgaaaagctgtttcgctattttctgagtctgatttaaagccgctttcctctattttccgcttccgcataaaattgtgaaaaaactgcttgcttttttcccgggcatcgtgtataataaattcgttatccgggtgtagcgcagttttggtagcgcgcttgaatggggttcaagaggccgcaggttcaactcctgtcactcggaccataactggacatcaattttgatacaacacgtatcttgattggtgtcctgttcctttattacagaggttttggtttccatgggtctttaccatacgatttaatcatctttttttctcagaaatcctttccggtggaaaatattgcagagaccttcggcgatgaactccgatgtttattttcaccatgtatttgttctattcaaagataaagcagggattttaatgaagcaaaacaaaaacggattcacattgatggaaatgctaattgtcattgcaatcatcgccgtattgattgcagttgccattccggtatttgcgtcacagcttgaaaaagccagagaagcgacagatcttgcaaatgtccgctccgcttatgcacaggtgtctacagaggcgttgctcggagattctgagactaccgtaaccgtcaacctaaaacagaagcaggccgactggcaatcagtagatcctgtgaatatcggcggtattgttcattccaaaagccaaggagacacggagaactggaaaggcgttgctgcgccaaacggaacctgtgtcgtatcgtataaggaagattacggaatcattctcaattggagcggaaaagccgacccatctacacctaaatacccgtttaacacaaacataacggatttcttcccacttctatacgaaacggaattttggaaaaacggcagcataaaaaccaatacaaactttgagtttgactccagatgtccggattcgcaatatgttccagccattaccgcagcgattgaaaagctggataagagtcttttgcagcagcctaattgcacatgggcctatcttggcgacggaagagatagacacgaagcagatcggtatcttttctggacatctctggacacggataaggtcggggccggaaataaaatccccgtaattattcaaaccggtgacgggaaatattttgtttccgaaaccaagaccggtacgcgaaaaggcaagaagtatgtcaccatctcggaatcgcttactacgcaaagtcagtataaggaaattctgaaaaaaggagagaagttttcttcgttggaagaggcttacgatgcctacctcaaagcattgggtaattccaaatacgattccgtacgccagtcccagtcttaaaatgctctattccgttacaacctctaaatcagcattctcagcaacttcatcaaatacaaaaagagacagcttaaagtgatatgcccccataccggatgtccagtattggggtacatatcaaagcaagctgtctcttttttacttgattaattatgtagttatactgcctgcaagcgatatttttccgcgtaggtgccgtaggcgcggcggaagtcggggtcgtcggcacgcatggcgcgcagcgtttcgtgcagattaagaccgtggtttgccgcatccagaacacagccggcgatgttggagcagtggtcagccgttcgctcgagatccgtcagcaggtcggaccacacgaagcccgcttcaatactgcaatgaccctgctgcatgcgcagaatatggcgcgtgcgcatctgttccttcagtgcaacgatgacctgtttcagcggctctacctgtgcggcggccgcaaggtctttttcgctgaacgcgcgctctgccgtattcaatatctcactcaccgcgccgatgagcaccttcagctctttttctgcggtggcgctgaagccaagtcccttgctgcgcagctcttccgatgccgcaagcaggttcacggcgtggtcggagatacgctcaaaatcgccaataatttttaataattcggtggcttcttcgctttcggcatcgctcagctgctgggcgctcaggcgcaccaggtatgtaccaagctcgtcttcgtagcggtcgcagcggctttcgttttcacggatggattccgcaagctccggcgaataattttcaaaggtcgtcagcgccatatgcagcgcttcgcctgcgcagcgtgccatttcactcgcaacggcacggcagcggccgagcgcgacggacggtgtgatgagcagacgttcttcaagctcaacaggctgctctttgccgcccttatccggcacgatgcggattgcgagcttttcaagcaggccgcctgccggcagcagcatcgccgtgcacaggatattaaagagcgagtgcgcaatcgcgatgccggacatggtggcgttttcatccagaatagccggtgcaaatgcgatctttacaatccagaaggccgtcagtaacacgaccacgccgataacgttgaacatcaaatggacaactgccgcgcgctttgcgttcttctgtgtgcccacggaggagatcagcgccgtaacgcaggtaccgatattctggcccatgataatcgggatagccgccgcgtagctgacctgccccgttacggccaacgcctgcaaaatgcccacggaagctgagctggactggatgatacctgtcaaaagcgcacccgcaagcacgccaagaatcggatttttgaacatcaggaacagcgaagcgaacgccgggacatctttaaggcccgaaaccgcgccactcatggtttccatgccaaacatcaaggtcgcaaagccgagcaggatcatgccggtatctttctttttaccggacttgcagaacatatagaaaatgatgccgatgagcgccaaaacaggcgtgaaggatgacggctttaaaagattcacccaaatattgctgccgctgatgcccgcaaggctcaacagccacgccgtgacggtggtacccacgttcgcgcccatgataacgttgatggcttgccgcagtgtcatgagcccggagtttacgaagcccactaccatgactgtcgtcgccgacgagctttgaatgatggctgtgatgccgaggcccgtcaaaaagcccgccggtacactgccggtcattttatcgagcaagctttgcagcttgccgcccgcgcggcgctccaaggcctgccccatcaggttcatgccgaacaggaaaagacacagcccgccaatcatcgtcagtacattgaaaatatccatacccgattttccccttttaacattcttttacacgtataggagtatatcgtgtctatgtcaaatcaactgtgtgttctttgtaaaatccatgtaaaatcgcttgttaaaaaacgacacaaagcatgaatatcccccggcgaaaaaccggaggatatctacgctatgcgtcctgctgaattttgctttacacggtgccggtgataacaacctccgcggtgccgggtgtagtggcccatgtgccgttttcgttttgcgtatactgcgcggcgggaacggtgatctgtcccggaagcgttgcgaacacgccggtcgtttcaccatacgtgtactgcgtacctgctgtccaagcggtgccgttaaacgtgaccgcaatgtttttgaggatcgggtcaaacgtatcggtcagcacgatgcgctcggcttcggaagcttcggtgttgcccgtgttttcgatgacgaacgtatacgtaatctgcccgttccccgtgacgaccgcgggacacagcgctttgctgatggtgagcaccgcgcgatcatccgtggagacagtttccgacgcgctgacttccagattgccgtccgtgacatttgcggtattcgtgatgctgccgtccgtgccgagcggtgcatacgctgtgacctctgcctcgtaaacgagcatgatgctgccgtttgcggggacattcgggaccgtaatgacgagcggcggctccgacgttgcggtgggcgcggtctgcaagacgccgtttacataataccgaacagaattcggcacatacgcgagcggatagacggtcccgctattaaattcatacgcgccgaggttatcggtgaccgtgagatttgttaccggctgcgcaccgctgtttacgatagaaatgatatacgtaatcttatcgtttgcggcgtaatttttcaccacggcggttttggtaacggtcaaggtctccaaaagctcgcccgtgacggtgttggaattcgttgtgcctccgttatacgaaagcgtcgcgaaatttgtaaaagatgccataaaacccctccttgttttcgggaacttgccccttgtacaagttatgccgaagggggtttaaatgacacttttgagcttgtgactttttgcattcttcatgcctttttaaggaacctcttgatagggtttcttacggctaaacagcccaccggaccgtttagcctatcttcctgatctgttgtgaggcaaaaggatttcgagctctgcggaggttgtgggcgagcctggcgtgctgcgcatgcagccggaactggtgcgtgcggcctgtgaacgcgcccatgcgctcggcaaatttctttaattttacataattcggtttacataaggttattaacataattagatttcaatccattaaaaatctcctttgaagaacccataaaaccgggcttcaaaggagattttcgttttgttattggccgagcagcgaaagattatagtcctccatgcacgtcgcaaggccttcggcagtcgtctcaaatccaccgccggcgtttttgagctttgcacaattcatccagaggttttcgccgccggacttttcctgcaaattgagcttcatgcctgtttttttcataaacagctccgcaagcgcgtacatggagacatctgcctcgctgccgaagttatatgcgccaccgggcaaattcacagcctgcaaggtctgctctgcaacctcgcgcacataggtgatgccgcgaaattcctctttggaaagtgcaagcggcttttgggtgatggcggcgttcaggaacatcgtgatgaggttgctgcggttcggcacgccgaacatgggcatgtcatacatccacgtcgcacgcagcatgacggcattcggatcgatcgtgagaacgcggttttccatttccaacttctcttcggcgtagagatttgcggtcgcaacgtcgtcttccgtaaacggcttatcgccctttgcgccgctgtacacctgatcggagctgaacaacacgagcttcgcaccgtttgcggctttggccaaatactccggtatcaaaacgtttgcgtggtaggatccttccgggtctttggcacacgcaccgatgtccgagattgccgcggtgtgaaggatggcgtccggctgcacggtgtcgatgaggcggtcgatatcctctttttccgccccgcgcagagacggcgcacaaataacgggcgccgccgcacggatgcgcgcccccacaaagccatttgcgccggtcaacagaattttcatgataaactcctccctggttttaaaaacgacccgacaaaactgccgggtcgtctggatgcaaaatgaattatgcgttttcggtctctttgtagcggcgtgcgcagtcctgtacgatggcgttcatcgcgtccattttattcagcatgtcctttgcaagggcaacctggcagcgcgtacggacaaggttatgctgcggctttttgaccttaaagtacttatcgccaacgatgtagtccgcgaggaagcgcgttgcaagctcgcaggtaagcgcaaagcagctgagcgccagcgtatccacttcggttttcgtcagagacgcggcggtctttttaaggaagccctcggcaaatgcccagaaaatattgaggtttacgccggccttttccggatgatcgcaatcttcttccacaaaatttgcagcaaagcggatggcatcgccgaaatcgtggccgacaaggcccggcataacggtatcgagatcgataacaacgagcgcctcgtgcgtcttctcatcgaacagcacgttgttgatctttgtatcgttgtgcgtaacgcgcagcggaagctcgcctttttcaaagaggtcggtcaggcggcaagcctcgtcctctacggaaagcagccaatcgagctcttcgcgcacctctgcgacacgattgcacgggtcggccgccatgtcttccttcagcttctcatagcgcttgcgcgtgttgtggaagtccgggatcgtgtagaaaagggagttcgcatcgaaatccgccaacatcagttggaaatcgccgaacgcctcacctgcactgcgcaccacgttcaggtcgtcgcaggtatcgaacgtcacagacggcacgtagttgctgagccgccagaagccgtcattatccatcaaatagttgacgccgtgcttcgtgtgatggaaatgcaaacttttcgtattcgggcatttttcgcggatgtgctccgtgacacggtcaatgttctgcatcagctcaatcgggtgctgaaacgcatatgtattgacgcgctgtacaaggaaagacttaatctttgccatgccggtaccgtcatcgcgaatataattgactttgtaggtgtggttcacgttgcccattttgatttcttcatacgagaagaacgggccttcaatgcggaattcttcgccgacctcgagtaactttcgggcgatctccgggttcatgtccatttctggaatactcataatcctctgctcctttaattttctggcagtttggccaccactttttaagcataaacataaagggataactgtaaagattatagcagaaatacggtaaatttcaagtcgaaaaataaaaaaggcgcagagctcgctcggagattccggcagccctgcgccttttgctttatgtatttacttttagaccttcttcacccagtcgagtgcgatccagccgccggctttgagatggccccagcctttggcggagccggggccgctgcgctcctcaacaatcgtatagcgaagcgtgttcttgatctggccccgcacgccgtaatttgtgcccggacccttgcggatgttcagcgggtcacggcagtttttgcggatgagatagggggtaaacttgctcgcaacgggcgtttttgccgtttccatgtagcttttcaccatgttcaaaaagcgctgccagcccttatcaagcgtgcggtgcggacaatatttgccgtcgaagtcctgatgcttcttcacgtgcgaaatatcccacttgcgctcggtgagcagctttgcgatatactctgcggcgttcttttcggctttatcgaaacgcgtgccgcccgaaagcgaatagcaaatttcaatgtggatgccgtgcgcattgccgtcgcgccgccccgcagcaaacgcacctctactcagcggaatgcctatgataatctccttgtcatcgaccgccgcgttaaacgacgtagagctatcgttgcgaatcatatacgcgacttcattcgcggcggaagcatcgttcgccgtgttgtgcacgacgatatatttcatgtcctttgcgcaggactccaccgggactttcaaatcatatttgctctggctcaaaagattttcgcggattggtaccattatttttcctcctctagttaatcatgaaatatttcataatttccctcgcattgtattttgcaatcttctttgcaccgttttcgtttgtatgaataccgtcaagcaaatcagtctgaattggtgcagcaccagattgttcaggatggtcataatcaatcgttgtttggctttcgtagatgtttcggattccgcatctgcgagtatcgattgtttctgctccaagcctatcggcaacaaaattgatgaaatcacctttcttgtaaatgctatcgaaagtttcataacattcttgggttggtgtacacataaatatcacggcatttggatatgcttcatgcaatttctggaatccataccgcatagcgcctgccaatgtctgacgatttacgttatcaataggcacaacggtaaagttgttttgagcataattcgtgataaactgtgattccacactttcttttgtttgcacagagaaatcaacagaatcatttgttccaaacgagaatgtaatcacgtcaaagtcctgataatctgcatctccgtttgcttttgcatttagcactttctgtacttgatttcccattacattgccatttgtggaaggttgtggatttccgtcatacgtctgattagcaactttatcttgccatgtagaacccgcaacagacacattcacaaccttatcagcaaggagatactgttttatccaatacgtccatccgtttacaccacccatagcggtaatactgtcgccaagtgtaagaatctttaatcctttccactttggaagaatcgaactcggcaatgcagattcatttactgtaacataaagctctccatatggagtaaatttagtaattccatgttgctcgattttcaaagtgttaagagtatctccaagacctccatttttagagaatcttaaataatacgcaccatcgggaactgtcaatacggtaggttcattgtttatgccagacaaatattttttatctgcatcaaaatatgctccggtacttgctacgccgatagggagttcattattactgaaataaagaaccattcccggttttacaggaatgtagccacttgtttcccatgatgaaaagctagtatcaaagtatccgctatctggaagtacagccccttttacaacagtatctttgttaaaaagatttgaatggtcttcctgtatttttacaacttcggctttgacttcgcttacttcggcttttatattgtcagtgtcttcctttacattatccacatcggctttgattttaagctcaccatatggaacatatgtggttcttgaccctttttcgatctgcaatttttctggtgaagtgccaaacgaaaaccttgcatacccatcagatgtaactgttacattattattattattagggttgccaaatccacttataaacttcttttgagcgtcataaaaagcgcctgtgctgtatggcgtcggctcattgtttgcgctaaaatagagtacatcattttgggatacaggaatatagtctgtagcttcccatccgctaaatccattcatttcgctgccatcaccagaactgatagccacattttcttttgccgctgccggattaaaaagattaggagataatatgttgtctatatctccctttagtttgccaacctctgctgcatccgcagcttcgcctgcatggctcaaggtggtatcaattacagcgtctttaccggggtcgcctttttcaccacgctcgcccttggggccttgctcgccttttgggcctgtggggccaatatcgcccttatcgcctttcgcacccgtaaacttgcccacatcggcatcgtcacgcacgctttgggcaagcttctcggcggcgtttgcggcaagcatgatctgctgtaccacgtccggcgtaggctcggcgggttctgtgccgctcgcaccagaggacggcgccaccttgtacagtacatcgaccgcaatctgtcgcacgccctccttgtagcccgcgaatacgatctcgcccatgcccttttccgccgtggcttcgatcggcacgctgatttgattgttcgcgccgacgcgcacctgcaccgcagccccgaccggcgggtgaaacgccgctaaaatatcgtactccgcccaaacaccctcacgaatgatcgtcagcatctccatgccgtagctgcccgccgtgccaagatataagggttgctccttgcagtacgcggcgtattgtttgaggatgatttcatgattatttttcatctgcattatctcctttacttacggtgttcttcaatctctccaacagtttagacagccgcggaaaccccggcacgccgatggcagcgaggttttccagaatcgagatcagctcgttgatgatgagccagattgcgacccccgccccaacgattgccgttacagatttaagtacagttgctttgttcatttatttcctccttattttaaataaaaattataatctacggtgccgaaagctatttcgccgccgcccagtgcaaaatatttgcccgtcgcatactcgggcagcccggccgcatttactgccgacgtattgtagatgtggcaaagcacaatgccgccgaatcaggatgctgcgtgccgatacacagtagcctatatttattcggataggctttgcacacccaaataagccactgcttaaagtattcggagacgcttgatccagtaagtcccagtgtgccataggtaacacgcggcacaaacacgattggattagatgacacatcatcacgatttacgggagtatagctgtcggcttgcaccgtaccccgaatccgcgtattccacgccacgtccagccagtttgcgagctcggccaagattattttagtcacgtctgatcttcctttcatgctttttctcaaaggtcgctttcgtcccacttgactgcccaccacacgcctgcgtagtccgttttaaggctcgctctctggcagagccgtatgtaatcatttcgctccatttttgttttccacctcaaaacggcaggtcttccatcgcgagcggcgagacgctctctttttcccagccatagcgaaaatcgttccgtccggcggcgctgtacacgcgtttggacttttcgtcgtaccccaccgcgatcgcgttgtcgttcagcgcaagcttgccggtcatgcggttcttgagcaccagaagctttccgcctgcggaagcgtcttcgccgtttttcacgtagctgatgaccgtatcgacgcggttcgtgatgtctgccgagccggaaaccgcatcattctcgctcacgtcgccctgtgtcttgcgcggatgagcgacgagcagcaccgcaatgttgtgctttacggcgagctgttttaactgccgcacgaaatgcgattgttttaaatactgcgtgtcggtggaagccgcgtcgatcgccgtcatgaggttatcgatgcacacgaggttgatgccgtagcggcatactgcctgttcgatcgtatcgagcagcgccgcatcctcatcgtccaccgcattgttgtcgtaaatgtacgccctgccgcggtaccattcgccgatctgctccgtcacgtcctcgggcaggcggtacacggcgtcggaaaactggttgtagcttgtctccacgttctgtgggcccgcaagctgcatatcgagccagcggcggaaatggtaatccggcaattcgcccgaatacgccagcacgcgcagtccctgattcagtgcttcggcggcgagctgcgacaccacggtgcttttgccttcgccgcgtttgcccgtcacgaggatcacctgcccgtagtacagcccgccgatcacacggtcgagcattgcaatgccggtgttgattttcggcagcttggagagatccaccgccgccacgtccgcgagctccttgatgtgcgtcaccgggatgatgcgcgcgtttgccacagcctgccgcagcgcttctgtgccgtacttgcgcagaatgtcgttcgcgtccttctcgccgaggtaatcctcctgccgcacgaccttcacaggcttcggcaagcggcgggaaagcgcatcgaccaacgtgatcttgcccttttcgcagtcgccgaagacgatgacctccgcaaagccgttgatccactcccagacgttttcgagccacgtaaagcccattgcgccggtcggcacgctgactgcgttttgtatgccggcttcggtgaggctcaggctgtcgatctgcccctccgtgatgacgagccgttctttgccctcgcagcggtccatcccaaacagaatcggcatcgtgtctttttccgaccactctttgtttcggtcgcgccctttcacgaaatccgtcttgcggtatttcacgaactgcatcacgccgtcgccgtcgtagaacggaaaaaaccagaatgttgtcgtgcccgcgctgcgtggtgatgcggtagcgctccgtcactgcccggctgatgccgcggctttcgagataccgtactgcggggtttgtcacctttacggggcgctgcggcagcgtgcggtactttttctttcggccatcatcaaactccagcgggtaaccgaagtcccgggcgagctgcaccagatgcccctgcgccccgcacccggcacggaagcacttgaacgttccgttttccagattgaccgaaaacgtgttcttgtcgtgtccgccgcccttgcagtacgggcaccagcggaaaaaaagctcctcgccgcgctcatgtgtttccgcacccagcgccgaagccagaccgtaaacgtccgaccgcttgaattcatacggcatgtcagatccccctctccgcgtagtaggcgtctgtcaggttgccctcgtcgtacgggaacgcttcgcccgaagggcaatttgcggcgcagccgccttcttcctttcttttagagtacgtagtactcttcttatattcttctattgttgttagttgcttgttaggctgtttgttacccgtttgtttttgggttgccatcggctttgttacttcttgatatgtattgtaattattcacagtgataatgcggcatttttgcgttgacacgtttgttatttcgcctgttgcttcaagatgcttcaaagctgttctggtctgttgaattgtgagccccgtttcttccgacaattttgctaacgaagttacgaactgtccgcgcttaattttcgtgccatttacacatccgattttccaatttgcacgaaaaatgcaatggataaatagcacttttgtcggcacatctctgtaccactcccattcggtcattttgcggtcgaattttacgaatccgttattgcttgcgggcattccatcacttccaatcgttctttcagctcacggtagagaacctcgcggatcaattttccggtcgttgcgggctcgcagaaaatgatctggcagttataccttgcaagccatgccgtaaggctcgcgacaaatgccttcggctgcatacggctgcggtacttgcccgcatacgcaatgtctgctctgtcacatttaaactgtctgccagctctttgcgggtcatgcccgctcgcgcacgctcggcttctatgttctttagtgggtgcattctctctcctcctctctcactctttacctctgctaccgctctccgtcgctgccagctccatgccggtggcgaggcctgcggcgtgggtttccgccagccttgcggcgatctctcgcttatccgcgggcagcttgtctatcagcttcggcgcggtggtcgcggcttcttttgctttttcgcccatgcaatcacctcctgatgtggattagctgtttagcttagctatattataacttagcttcgctaaaatgtcaagcactatttttagctgagctaatttttgatattgacaagtaaatttagccgtgctaaaatatggacagttaagttaggaggtgatcgaacgaacgaagagttcaatacaaggcttttacgcgttcttgatgaagctaaatgcagtaaaactgtcgccgctaaaaagataggcgtttcatctgcttatttatctcagctttgctcgggcgtgcgaaatcccagcgatcgcactatatctgatatatgccgcgtcttcggcgttgacccgatttggctgcgtacaggcgttggcgaaatgttcagcccacaaagccgcgaagaagaactcgcggagattttcgctaaggtgcaaatcggcgacgacgacaaaagtcgtctcatccgcgcaatggcacgtatgccggacgaagctttcccggcgttcctcaaatttgtcgagcagctctataaggctttatcggaagaaaaataaaaaaatcgggagccgcattttcagcagttcccgattaaaagaaggtttcttattctttttccacccacaccagcgctgttatgtagagcttgcgcagccgatccatggatagacagcgcagcaggtcgatgattgcgtttatcagtttttctcggttttcgtgttcgtttggtttcatcattcgtcctcctcgcattctccaaaacgcatgttcgatttaagatgagtctatcacattgcgcgcgcgccgtcaatggattttaagaaagatgtcctacgatgtcctctaatgtcctatgatgtccgcttaggtgagcagaaattcgacagaaaccatctttctatgtcaattttataccacattctgtgcaaaagccaattaaaaatattgggtaattcgactattataaatatcaaagcatgaaccccgcacatcaagtgcaaatctatgacaccaaagatgttcctgttcgtgtgcttggcaaggtggtcgaatctcggcataaatactaaatttaggggaggatttttcaatgaaaggttcaagagaattcaagggaaatagtttattggaagatgtttccgactacgttgctatcgatttggaaacaacaggattagacccaatgtatgacgacattatagaatttggcgcagtaaaggtctccaacgggataattattgataaatttcaatctttaatcaacccggggtatgaaattagtccttttatagctactcttactggcatatcaaatgaaatgttagcatcggcaccttctcttgtaccaactctttcaaagttcattgaattcttgggcaattatactattgttgggcacaatgtaaacttcgacattaattttatttatgatgcttgtgttaacaatttaggtgttgctttttccaacaattttattgataccatgcgacttagtcgtcgcatattttcggaagaaaaacatcatagactatcagacgtatctaaacggttttcgattggagaaaacgtggaacatagagctttgtctgatgctatcaaagctcatgagtgctacgaaagcattaaaaaatttcttgcagaaagcaatatatcgttttcttctctttacccacatacaacttacaagcattcatctgttcgtgcaaaagatattgttcctacaatagatgttcctcgtgataccagccctttttttaaaaagatttttgttttcacaggcacattagagcataaaacaagaaaagaggcaatgcaaatggttgtaaatcttggaggactatgcggtgacagagtaactaaacaaacagattttctcgttcttggaaatactgattattgtaagacaataaaagacggtaagagtagcaaacaaaagcgcgctgaacagttgaaattgtcaggttccaacatagagatattgtccgaaaacgcattttatgatatgatggcttctgaaatatgaggaagtatatgatcgaagaagtttttcaaacaataaaggactccatcaacaaacagtattttggcaacagtaagttttactacaataaaagcgcaacaaccgggctatattcgcttatggtcgaatccactccaagtttatatcatttggacacaagtgctcatttatttgctcgggtaaagcttagtggaaaactgcagtatatatcttttagtggaacatttgaaaaagattttgctgcactgaatattccttttacgaaaatcgcatcagatgattttgttcgcattgatattgaatacttcttaaatattgcgctcaataattctgctgtgcataaactacttaatcgcatatatacaagctcgtttagttttccgtcttttggttgttgcgcaaaatacgttgaatgcagtaatgcaggtcattgcttgcatactgatattctatatgcgtcggctgcttgtcaatacaagcataatttagattctggacgtatattttacgccacaaataaaagttaaagaaaaagccccgccggtgctaccaacaccgacgaggccgcccgagtcaccccggtggacaatatagtcccagacaagctatattgtaccacctgacccgggcaaaagcaatagcccgggcatttttatgcccaaaattagtcgttcttctttgaggacgtggatagaaataggacgtggatagaaacatgcccaaaagcaggaggtacatatgaaaaaacgagcagatgggcgctaccagcgcaagatcacgctgccggacggcacgcaaaagcacgtctacggcacaagcccggcggaggtaaaccgcaaagccaaggaaatcgaacgcgccttcgagaccggcatagatctctcaggccgccctgtgcctgtgaccgcccgaaaatctgactactttttgactacctgacccctttaaaaaggccttaaaaaaccgatattcagaaaataaaaaatccagtgtcgaaaccaaaaaacggcttaaacactggactttttcttggagctgctaaccagattcgaactggtgacctcgtccttaccaaggacgtgctctgcctactgagccatagcagcatacgcaaaaggcaagatgaactcgccttttgtggcgacccggaacgggctcgaaccgtcgacctctagcgtgacaggctagcgttctaaccaactgaactaccgggccatggtggcaggggcagtaagattcgaactcacggcacgcggttttggagaccgctgctctaccaactgagctatgcccctatttatctcacggcctcttttcgaccgctcgattattctaccacgaactacggaaaatgtcaacctattttcccaaaaataattattttttacccccgacaaggtgttttatgcaaaaaatgcagacaccgtgccgaaaaacagaaaacgcccgtccttttggaacaggcgtttcggtgactaaactttagcgggaaagatcctgagagatcttgtagagcttctcgtcgaagacgcgcggcatctcgagggcttcggtaatgtcgaagtctacgatgcgttcgccctgcatgacgacaacgcggttgctcttgccgtcgcggagcagctcaactgcgtggtagcccatccggcttgccacaacacggtcacggagcgtcggggaaccgccgcgctgtacatggccaaggatggtcgcgcggctctcaatgccggtctcctcttggatgcgcttgcagatatcttcggagtgacctacgccctctgcaacgaccacgatgaagtggcgcttgccggtcttctgtgcgtagcggatgcgctcgatgacgtccttttcaaagtcatacttcacttccgggacgagcgttgcgattgcaccgacagcgatgccggtgttgagtgcgatgtcgccgcaacgtctgcccatgacctctacaacgctgcagcggtcgtgagactctgtggtatcgcggatgcggtcgatcatttccatagcggtattcatcgccgtgtcataaccgatggtatattcggagctcgaaatatcgttatcgatggtgcccggaacgccgatgcaaggtacgcctgcgccggtcaggtcgcgtgcgccgcggaaagaaccgtcgccgccgacgacgaccacgccgtcgatacccagttcgcgacatttagcagccgccttctgaacgccctccggggtattgaactcggggctgcgcgccgtaaagagcgccgtgccgccgtgctggatgatgttggaaacgctgcgaagctccattttctgcacttcgccggtcagaagaccgttgtagccgtgacgtacgccatatacctccatgccgaaggagatcgcggtgcggacaacagcacgaaccgcagcattcatgcccggtgcgtcaccgccgctcgtaagtactgcgattttctttgcacacattgtaaattcctccactttcttattgaaaactgcaaagttaaaaatgcaattcaacaatttattccattcattttttgattataccccttttccctgacggtttcaagaggtattttgtcttttttgaatcggtttttgtttttttgagaatttcttattctttcagcgcaacatttccctcgccgagaagttttctcaatgcggagacgagttcgtagttcaccgcaacgcggtaacgggcgggcgcgcggaccagctttttcgtgtccgtataatatagatagaggtcggtcacgccgtcgaaaatctcgatgtactgcatcgcctttttgcagagcgggtcttcggcgttcggcacacgcaggtaaaggcccttataggctgtgttatagcccttaatctgcacaccgggccgctcttccccgcgcggcggcgtgacgctttccggcacagcggcaggcttttgcgagtcccttttcttttcctcaggcgcaggccttctgcggatcatcatttcttccggcgaaaacggtgccgaggcatattcgcagatgaacttcgggtctttttcttccgtaaagctgatgcgtccgtgcgcccaaacagagccgcccggcgcaaaaaggtcgccgtatttttccaaaaccttcgggaaaacaagcgcctccatagagccatacatgtcttccagcgtgacgaacgccatggcagagccggagcgcgtcaccttctttttcacgctttccacaacggccagaacgtccacatactgctcgtctttatattggtcggattccccggcggcgctgcgggcaatctcatcaaagcgcgcggcgatgccggcgttatagacctccgcatacggcgacatggggtgtccggaaaggtacatgccggtgacttccttttccatagaaagcagttcggttttggggaactcctcggctttcggcatctcgaaagattccgttttctcctccccgccgaagtcaaacaggccgatctgtccctctatgttgcggcgtttgtcgtcctccagctgatcgagcagcgggccgaccgccatcagcatttcgcggcggttattgccgagaccgtcgaacgcaccgcagcggataagactttccacggcgcggcggttcaggtctctgccctgcatgcgcttgcagaaatcgtagaaggtcgtgaacgggccgttcatcgtgcgctcggacaaaatgcgctgtatcaggccgcgcccgaggttgcggatggcgagcaaaccgaaacgaatgctgttttcaaaaacggaaaagccctgctcgctctcgttcacgtgtggcggcagcacggcaatattcagcctgctgcattcttccatatacgccgcaatcttgcctgcggatgcaagcacacttgtgagcaacgcagccatgtattctttcggatagtgatatttgaggtacgccgtgcgatacgccacaacggcatacgcggcggcatgggacttattaaacgcgtaggacgcaaagcttttcatctcatcgtagattgtctcggcggtctgctcgtccacgccgcgggcgatgcagccttcaatctccacggtgccgtcctcacgctttaagccgtgaatgaaatactcacgctcctgctccatgacatcgtgctttttcttgctcatggcgcggcgcacaatgtccgcgcggccgagcgaataccccgcaagctcgcggaaaatgcgcatgacctgctcctgataaatgatgcacccgtaggtgacatccagtattttggaaaggcgcgggtggcggtacgtgattttatccgggtgcttgcgattttcgacgtacatggggatgaacttcatcgggccggggcgatacaaagagataacggcgatgaggtcttcaatgctcttggggtcggattgcatgatgacacggcgcataccggcggattcaaactggaacacgccctctgttgcaccgctcgcgatcattttaaacacgtccgggtcgttatccggcgcgttttccaccttaaagcccggcgtgtgtttcgcaatcatctgctcggcgtggtcgataaccgagaggttgcgcaggccaagaaagtccatcttgagcagaccgagctgctcgatggccgtcatcgtgtactgcgtaacaggcgaatcgtcgttcatgctcagcggcacgtaatcgacgaccgggcggtctgtgatgacaacaccggcggcgtgcgtggacgtgtggcgcggcatgccctcaattttgcgcgccatgtcgagaagctcgtgcacctgtttgtcgctttcatataaatcgcgcagctcagagacgcgttccagcgcggcatcaatcgtgatgtcgagctccatcggcacaagctttgcgacggtatcgcacgttgtgtacggaatcgccatggcgcggccaacgtcgcgtatcgcaaggcgcgccgccatggtgccgaacgtgacgatctgcgccacatggtcggtgccgtatttttccgtgacatactcaatgatctcctgtcggcgctcgtcgctgaaatcgacgtcgaagtccggcatactgacgcgctccggattcaaaaagcgctcgaacagcaggtcataccgcagcgggtcaacgcccgtgatgccgatgcagtatgcggcgaggctgcccacgccggagcctctgcccgggccgaccgggatacccatgcttttcgcctgacggatgaaatcgtacacgatgaggtagtagtttacataacccatcgtatcaatcgtcgaaatttcatattcaaggcggtctgcgatttcttttttcgggttttcgccgtagtatttgtgcagacccgcgtaacacatgcggcggaaatattcgcggttgtcgctgccgtccggcgtatcaaagcgcggcagcttcgttttgccgaactcaaattccacattgcagcggtcggcgattttctgcgtgttgtccgctgcttcgggacaatccgggaacagtgcacgcatttcgtcttcgcttttaaaatagaattcatcggagccgaattccagcgtatcctcatcctccaccgtgcggtttgtctggatgcagacgaggatatggtgcattttggtgtcttctttttcgatatagtggcagtcgttcgtcacgacgagcggaatgcccgtatctttggacaatcggattatttgcgggttgatatgtgcctgttcgcgcaagccgtggtcttgtaattcgaggtaaaaattgtcctcgccgaaaatctcacggtagcgcagggcggcggcttttgcttcgtcatagtcgccgacggaaagcgcgcgcgggatctcacccgcaaggcaggcggaaagcgcgatgagcccctcgctgtgttcacgcagcagctccatatcggcacggggcttgctgtaaaagccctctgtccacgctttagagacaatggcgacaaggttgcggtagcccgtttcgtttttgcacagcagcacaagatgccggttttcgttatcgatgccgtgaattttatcgaaccggctgcgctttgcaacgtagacctcgcagccgatgatcggcttgatgccgcgctttttcgctgctttataaaagtcgatcacgccgtacatcacgccgtgatccgtaatggcaacgcttttctgccccatctcctgcgctttatcgagcagcttttcaatgcggcaagcgccgtccaaaaggctgtattcggtgtgcacatgcaaatgtgtaaacgccattttcgccctccttttccatttaagtttacataatcgaatttacataaacctctaattgtcgttttcaatcacaagggtaaatccgtgctcggtggaaaaatagtggtttttatccccccacgcggtatcgatcacaacgtagtatgtgccgtcgttttcagggtacgcaaaccgctcgctgcggtagtaaagctcggagaaatcctcgttataaaccgtgtaatacatcgcgccgtagggatcctgcgaggcttcaagcacgatgcctttatccatgcgaatgaccgggaattcatcggcaacctcttcaatttcaaaatgcccgccgcacgcttttgaaccgttcttcctttgctctccggtcacgttctgcagcgcggtaatctcttcattgccggagcgcaccacgatatcgccgggcacaagctcggctttcagcgcatcggcgatgaaatacgcgcccacgccgagcaccgcaacaatcaaaatgcccaacacaaggtctttaaagctcttcggtctttgcattttcagcatgcagcttttcctccacttcaaaaacgctctgctccgcaagggactcctccggcgagccgagctgttccgcaaactccaaaatgcggcgcaggcggtgattcacaccggaacggctgatggaaagccgctcccccatttcgcgcagcgacatttcggggttttccagccgcaaaacggcagcctcgcgcaggtcggcaggcagctcgtccagccccaccttgtcgctgatgagcgcaatggcggcaatctgctttgttgcagcagagtacgttttatcaagattcgcggtctcgcagttcgagacacggtttaaattgttgtaggtctctttgtacattttgatctgcatcaggttcatggcggagtttaccgcacccgtcagcgtgaggaaatcctcaatggcggcgctttcctttatgtagacaatgtagctgttttttctgcgtgcaatagacggcgaaagctgcgcggccttcacgcggtgcagaacagccacaaggtcttccgcaaggtgcaggtacggcgtggaaaactcaaggtgatactccttctgcggatctgtgaccgtgccgcagatgaggaacacaccgcgcaaaaacgccgaaatgcagcagtccttttgcaaattttcctcgtgaatatgcaggttcacatcattctcatcgtgcccgaacgaacggatcatctgaatgcgtgcggcttcacccggaatggtgatggcatacgcgccgatattcttgcgccttaactgcgagcgcacctcggcgtatacaccggccgaaacggcggcggcctccgccacacggcgtgcaacggcggcattttcgcataccatctgcgattcccgcgcggaaaaacactttgaaaaaagcagaaggccgtagcattccgctttcaaacagcacgcgcgcttattttcaatcatacacagctcttgcttgcaatccgcagcaaatgacatgaaaacggctccctcccgctttattctttcgtgatatcccggtgcgagaccgtggcgtgaatgccgtttgcggcaaggtgatcgtgcatatactgcgcaagcgccacggagcggtgatgcccgccggtgcatccgaccgcgatgacgagctggcttttgccctcctgaatgtagagcggcagcatgtaatcgatcatatccgtaaagcgggttttaaagccctcggtttccttgcagttcatcacgtagtcgcgcacgggcgcttcaaggccggtatgttcacgcagctcctccacgtagaacgggttcggcaggcagcgcacgtcaaacacaaggtcggattcaagcggcagaccgtatttaaagccgaagctgatgcaatgcaccgtaatggcgtcgttgtcgttctgcaaaaacaggtcggaaatgcgcgctttcagccccgccgccggaatgttcgacgtatcgatgacgtaatcggagacctctttgaccgggcgcagcatctcgcgctccaggcgcacggcctgctccaaagagccctgcatcgcttcggaaagcgggtgcttgcggcgcgtctcctgaaagcggttgacaagcacgggctcggacgcatccataaacaaaattttatacggctcgttctgcgccttcagtgtttcgagcgcgctgaaaaacgacttaaaaagctcgccgccgcgggtatccgtgacgaccgccacgcggcgctgaataccctcggatttatcgcaaagatcgtaaaagaccggaatgagcgccgggggcagattatcgacacaataaaagccgatatcctccatggcgtgcatggcgcgcgttttgcccgcgccggataagccggtcaagatcacaaattccattttaaaaaccaccttttcggcagccaaatgccaccgtaaatcccacaaattttactcgctgagcgaaatgcggcgaatttccggctccagctccacgccggtcgcctgaaaaaccgtatcctgaatggcgcggatgagcgcttccacatcggcacacgtcgcaccgcctttgttcacaatgaagcctgcatgcttttcgctgacgcacgcgccgcccacggcaaagcccttcaggccgcactgttcaatgagcgtaccggcaaaatagccctccgggcgcttgaatacgctgcccgcgctcggcagctcaagcggctgcttttcgcggcgacggcgcatgaaatcttccattttcgcggtgatctccgcttccgcaccgctttcaaggcgcagctccgcgcttgtgatgatgcgcttcgtgcccataaaggcgcttttgcggtagccgaacgcgaggtcttccccgctcattacgccgggcgtgccgtccgcttcaaggaaatggacgcgttcgacgacctgcttcatctcgccgccgtaggcgccggcgttcatgtacactgcgccgccgagctgccccggaatgccccacgcaaattcaaggcccgtgagcccctgcccgcgtgcaaagctgcataccgtcgcaagcgatgcacccgcgccgcacaaaacatgaccgttcgcaaggctctgcacttttttaaaatcgccctgcagcgtcagcaccgcgccgcgcaagccctcgtccggcacaagcagattggaaccgttgccgaggatgaaatacgggacattctcgtcgcttacagcatttaaaaccgcctgcaattcagagacggtcttcacttcgacaaaccgatccgccgggccgccgatcttaaacgacgtgtgggcggacatgggctcatcggtcttatagcatacgccggcactttgtagtgcggcgtcaaatttacggtaatcagacattctcaaagctccttaaaatagcatcggcatccttgcggttttcaaggatgttcgtgtgcgcgcgcagatactcgatgaggcggttcgtgttcgcgttgagaatcagctcctccggaaacgcaatctcgcgcagcatctcgagcgccgcggtgtgatccttcacctgtgtctcaaaatgcgcgtccgagctgacgataaccggcacacggtgctttttgcagcacagcgcaatctcgcggcagttcgggatattcgccttgcgcacctcgaaggaatgcgagttgatctccacaagcttgtggtttcgaccgaactccggaatgaccgtttcataatcgtagcggaactccggactgccgctgtggccgatgacattcaccttcggatcgtgtgcaatgttgagccaaagctgcgtgcatttttcgaccgtgggattctcaagccccggcagtccgaggttgtgaatggacgccacaagccagttgacgtcgcggcgttcggtctcattgatgtcgagcgtgccgttcaaatcgatgacattcgcctccatgcccgcaatgagcagaatgccgcggtataaaagcggcagttcatgcatggaattaaagaaccacgggccgggcgcaccgggcatggtgcgggcgtggtcggtgatggcaatggctttgaggcctttttccgcagcggaatcgaccatttcgcgaatggtgctgtacgcatgcgtagacgccagcgaatgtgtatgcaaatctgcaatgatgttatacatgatgatattttctcactttcagctaaccttaaacgcggttaaaagtctttgatgaaactttcttcaggaagtttacgggctcttagggcagcgccctaagccgctttccgcagaaaacgaaacccttttgcctaccaaaagatcaggaaggtaggtcggacaatccggtgaattgtccgaccgcagaaactcctatcaaaggggattcctgaacaagatgccaaaacatcttgttttatactaaaatcatgctgttaaatatccaaatctctcttaatctcctcgtgcggcatcatggaagcatccatgccgagcgcggagagcagctcgtaggcggcgttgtagcccattttcttctggcggttgttcatcgccgcaacttcaatgatgatggcaaggttacggccgggctttaccgggatcgtcatcaccggcaccttgatgccgagaatttcggtgtactcgctgtccatgcccatgcggtcgtagaccttcgtcgcgtcccagatctccaggttgatgcacatgtcgattttctcctgcagcttaacggcgcccataccgaaaatgcgacgggcgttgatgataccgatgccgcgcagctcgatgaagtggcggatgttctccggagactgaccgacgagcgatttgctggatacgcgtcgaatttccaccgcatcgtccgcgatgagacggtggccgcgcttgatgagctcgatggccgtctcgctcttgccgacgccgctgtcgccgacaagcagaataccttcgccgtaaacctccaccaaaacgccgtggcgtgtgatgcgcggcgcaagctcgacgttcaaatacgcaacgagcgacgcgacaacatttgaggtcgactccgtcgtgcgcagcaccggcacgtggtacgtttcggcaatctccatgaagtccttgccagggtcaataccgcgggcaacaatcactgccggcggcttcagggacaggtagctatccagcgccatggcgcggcgcgacggctttaagctctccagcatgtacatttccgcacggcctaaaacggcgatacgattcgggtcaaaatattcgtggtagccgttcagctccatgccggggcgaacaacgtctctcgattgaatcaaaatatcatctgcgctcttcggcagaaaagcggtctcaagctgtaactcgtgaatgatcttggaaagcggtatggtgtaaacttccggcatcgtgatcttcctccctaaagttaagacggctgcaaaagccttattatgctgttttagcggcttttgctcccttgttttcggcgtcccacacaaagcacgcctaaggtacctgttatcttatactattatagcggatttgccgccaaaaatcaacttaaactccgctatcgggcattttgcttccgaatccgattcgatgtgctccgtgcaggctctatggacagagactaaggctatttcatcgatacgcttgcgggtgaagatcgccgtgctcgaaaaccggaagattaatgttttcgacggcaactatgcggactatctgcgcgtgacgggtcacgcataagcaagccgaaatgcaatgaaataacaaaagccttacgccttgctcttttttgagcttggtgtaaggctttttgccgtttatgctttctttttcagcggattccacgcgcccaaaaggtaaaacgcgagcgacaatgtactggaaatcacccagccgaacggccacgaaagccagatgcccgtgatgccgaacgggtgcaccagaataaacgccagaacaacgcgcagaatgaggtctaagaacgtggtaatcataaaatataccattgcgcccgcaccgcgcagcacgccgtccgcggcaagctttaatgcgaggaacagatagcacagcgagacaataagcagaaattttttgccgatctcgatggcctccgccgaggtgctgttcataaagagcagcaggaggttttcgccgcggaacacatacgcgcccataaagacgagcgccacggcaagcgacatcacaagccctgctttgaagccgctgcgcacgcgttccattttgcccgcgccgacgttctgccccgtaaagctcgaaaccgagttgctgagcgccgtcagcgacgtgatggcgaacgtattgagctttacgcctgcggaatagcccgcgatggcggaagagccgaaaccgttgacaagtccctgaatgcacaaattgccgaccgaaacgaagctttgctgcaaaatgctcggaatggctacgatcgaaatacggcgcagcatcgcaccggaaaacagcgcaggcttttcttttgtctcgatagactttaagcggtgcaagaccgcccagaacgcacacgcggaagctacgccctgcgcgaggaacgtcgcccacgcaacaccgccgacgccccagtggaatacaatgacgaacacggcgtcgagcgcgatattgccgacggacgacgcgatcaaaaaccacagcggcgttttgctgtcaccgagcgacgtgaacacgccggaagaaatgttgtagataaaaaggaataaaagcccccaaatgtaaatagcaaggtacagcgccgtatcttccatgatgttctccggcgtgccgagcatgcgtaagattggctcgcacagcaccgtgccgacgaccgtgagcaccacgccaagcaccgcaacagaaataaagcccgtatacgccgccgttttcatttctttaaaatccttcgcgccgaaaagctgcgagatgacgaccgaaataccgatgttcatgccgaacgcgaccgccatgaagatcatcgtcacggggtacgaagcgcctaccgccgccaacgcgtcttcacccgcaaatttgcccgcgatgacgctgtctgcgatattgtaaagctgctggaacgccacactcaaaagcatcggcagcgtgaaccgcagcaaaacgctcgccggcttgccggtcgttaagtccttattcatgtccgtttccccttctcttttcaaaatacgcacattattataaggaattacaaccaaaacggcaatgttcaaaatgcccaagtattttcacccacgtgcggaaaagactgcgcgttcggcaaaatcccgcccaaaatcataaacaaagcccgccgaaaaacgcatttaaaacgtctttcaggcgggtttgttcacttctatgcacgtcagcgcgccgttttccgctttgtacaggcgcgtgcagtatttcagcgcgcccgggcggtgcgtcgtcaaaatgcacgcggtgtccggcagcgcggttaaaagatttttcagaacctgcgcttcggtcttttcatcaagcgccgaggtcgcttcgtcaaggagcaggatcggcgcgccgcgcagcaccgcgcgggcgatagcgatgcgctgcgcctgcccctcggaaagcccgccgccgtgctccgcgatcttcgtgttcacgccgtttggcagcgatgacacaaacgcccatgcgcaggcggttttgagcgccgctgtcatttcctcctccgtggcgttctcttttgccatgcgcaggttctccgcaatcgtgccggaaaacagcgtgctgccctgcggtacatacgaaaacgcacagcgcgtctccgcgctgatgacgatttcgcatccattcttcccgcgtagcatagcacgtccgctttccgggtaaacgagtccgagcaaaacacgcaccagtgtcgttttccccgcgccggatgtgccgacaagcacggcaatctcccccggccctgccgcaaacgatacgtttttcagcaccgcttcgccgtttcggtatgcggctgtcacatttttgagctctaccatcagtgcgccctgcggcagggccgttttaccgtggcgctccttcggcagctcgcaaagctcacgcacacggtgtgcagagatcgccgtgctcaaaaactttgggataagccctgcggcactttcaaacgcacttgtcaggctgctgcgctgctgcaaaaaaagtgtcagcgtgccgaatgtaatggcacgcgtccacaataaatacagcccgtagcccatggcggtaaactgcgtgaacgcccccgcaacccgcaaaagcgcattcacgcgcacggaaaatatgttgtattgcaaactgcatgtgcgcagcgcttcctgtttttcctttagctttcggctttggctttgcattgtgccgagcgatttcaccgtatcgaccgtgtaaaacgtctccgcttcaaacgcggtcatttcgctgccgaggcggcgcagcttattttcaaatgcccgccgctttttgagcacggcggcagacagcagcaacaccaccggcgcgccgccgagcgcgatgagcgccatcacggggctgtaaatccagatgaggaaaaacaccgcgcacagcctgtaagccgtcactaaaatttgcggcagccagctcactgccccgccgcccacagcacccgtatccgtttcaaagcggtttaaaatgtcgccgcaggaaaacgcgtgcagcgcctgccagtccgcgtctaaaatgcggtcgaacacatcggcgcgcacgttgttattgaggtcaatctccaactttttcagcacgcggctcaccacgcagtcgaacgcgatggagaccgccgtgctgccaatagccgcgaaaaccaaaagcggcagacgggcggcatcgtaccccgtgacgatgtcgatgaggtacttgcccgccacgctgccgaacaggccgaccgtggtaccgagcacgccgagcgcgatatacagcgcgatcattttcttgcagcggcggctgtacgtgagcagccatttccagtccgccaaaacctcactgcgctcgcaaaagcgcaccttgttttctttacgctccatttggcaccttttcttttcgggcatggcggcgcgcaagcatcgcgataaaaagcggccttaccggtgttaaaacgagccacacggttttgaaaaaccgccacagcgcactgtttcggccgtaccacttacccttgcggcgcacggcaaggacaaggcagcaaatttgctcgccgtgcacggggccctcggggtcggtctggctgtcgccaagaagataccacccgcttttcgtcacgcgccaaacgcggtgcagaacatactgcccgtctaaccgccgaaacagcacgatctccccgcgctttggcgggtgcgtgcattttacaagccgcacggcgtcccgcccgtggatgagaaacggtgccatactgctgccgaacaccggcatttccatcacgccgcccgcttccgtttcggaaaggatcgcgccgatgtacgcgcgcagccccgcagcatctataagcatgcgcgcaggcggacggtctccgccacggtcgcggggtacagcgcctcatacaggcagtcgaccgcttcttccgatatggtacaatccagcaaaaacgccggtacgcggcgcagcagtgcttccacggcatcgagcacacgcgcagattccgcctgatcccagcggttcaccgtcacctgtccgtaaagccgcaaaaacgcctccccgcgcgagagcctgcgcacggcgttctttttcgcctgccgcagcaaaacgacggcgctcagccgcgcatccgcattttggcagatgcccgacgtgccgcagaccggccaaccgcgcgccatccagcaatcctgcaccttctgcaataaagcgcggtcgccgttgatgatctccgccccggcgtattgcgcccagagcgaggcctgcgtgctcttccccgtgccggacggtgccgaaaacagaatagcccgtccgcggtggcgtatgtaggcgctgtgcagaataaagctatccttttgcagcatgcggcgctcaagcgcgaaaagcgacgcgaataccgggtcaaacacaaggcagccgcggcagtcttcggcgatcatcacctcggcgtgcgtgtcgtccagctcgcgatacaatgcgtaaaagccaagcatgccctgtatacccaaaagccgcgattccttttcgccgtcgcggtacacgatgaggtcttcccgtacggccgtgcacacgccgacggggtttgggatgctctttacaaagcgcagcgtgtagaaatacgcaggctgcacgtctttcgtttcaaaacgcagaaaattcggtggaaaaacgagtgtatcggggtgatctgccgcaaagcagaaaccgcccaacttaaagagcctgtgcatggggtacagtctctcctttcttcaaaatttcgggcgctgtgctttccgcgcacagcaggcggtagagcgcttttgtgtaggcgcatacataaggcggcaccgtgccgaacgcgccgccctcgcgcaaagacgatgccggacacgcgcggcacagcggacgcagcttgcacacgacgcacgcttcattctgtttaagcgccgcagatttctcccgcaccgcacgccaagcggcccgcacgtcgttgtgttcgatcggcacggaaagcgccccgagcatcacgcacgggcgtaaatcgccgcgccagccgacggcaaacgaacaccgccccgcaaggcagcgcatgccggcttccgtttccgaaacagcgctttccagcgcctgtaccgtgcgttgcgcatattcgtgaaaaccgactgtgccaagctttattctcgttgcggcaaggcttgcggccgcggcttcttccggcgagagccgcgcttcatgctgtccgctttctgtggacagcatataggtgtccggctccaactctaaatttcgttcctttgtgatttgaaataacgtttcaaggtcatgccggttttgcctgaccacgctgacaccgaccttcaccggcacgccgtgcgccttcaaaagctgaatgccgcgcatcgcttttgcgtacccggtctcgtcaccgcacagtgatttgtaggtctctccgcttgcgccgtacagcgtaacgttcacgcggcgcggcggatttttcgcaaaaaatgccgcccagtcttcattcaaaagcgtgccgttcgtgttcaccgtaacgatcataccgagctttcgcaccgcgagatacaccgcgcgaaacgcggggtacaaaagcggttcgccgcccgtgagcagcaaaaacagcgtgcctgcgtcgcgtagcttttccgcaagcgctgtccactcctccgccgtttgcaggcggctgattttctcctgctctgtcctgttcatgcgaacataacacattttgcagtttaagttacaaagtggggtcagctcaaaactgccggtgatgggcacgcccgttttggcggcgcggcgcagtaaaaacgcttccgctgtgtctttctccgggtgcatcacgagtggttcggccgctcgttctgcgtcagcgttgtggtgacatggtaatcgtcaaagttccatacaggtgtcgcatttccgaaccagtccacgacgaatgcgtttttcgccggcatcacggaatcctgcccggtgatggaatactgctgtccgcacgcctcgttatagtactttctgctgtcaatgccgcggtcatacacaccgttgccgttcgagtccaaaaacacctctcccgaaatatcgcacacacccgtgtagcacgcggcgatgtactcgtttgcctcaaacacctccgtttgcagcagcggagcgctccatgcttttttcattttataccgcctttccttccgttttttccgcagcggaagcctcgcgcagcagccctgcgcgcagccctgcccgtacaaagttttctatgccgcgcagcatttctgccggctgcccggtgtactgcgcctctgccgcagccgcggcttctgccaccgtgcacgggtgctgaaactgcatccacaaaaaccgtcccgtttcgttcagcgcggtgatgcggttctgtggcgcgtccgtctccccagcagggatcagcacgtacaacccagcgatctcccgcagcagatgcctgccgtttacataaaatcttttcacgtcattcggcggcagccctgccgtttccatttccgggcttttcgctttttccgcccgctccatgcttatccctgcctttctgcttcgtggcttcggttataatcataacagaatttttggtattgtcaaccaaatatattttgcaaaattcaatcataatcagtaaaaatcaatatatttgtgcgtttttttgtcaaaaaaagaagagccatgcaggaaaacggggtgcgatttttccgttttccgcacagctctgagctttatcggtattctgttttcacattgtgatcatgacctgtacgttcgggttcttctctccgacaatcacgatcatctcaatcattttgtttacataatctaaaagtgcaccggaaatttttccgtagtccgtaaactcaatttccgcttccgttttcggcatttccagtgccgcctgcaaagcttccaacgtcggtgcaacgcggcgcagacgtagctccgcgttgatatactcgtgcaaatcgcgaatgtccttcacgtccgtcagctttatttctgctcgcatacgcttttccctttcgtgatgtaaatttcgcgcataaagacctcgtcgcgcgcagcggtaatctgtacgcgcacgccggaaagctttttgttcgtgtggcccgtcagcgggttctgcacggcgaacggatcttccagctcgcagatgtgcttattgccgatgcacgtgccctcgaataacgcgtaatccgccttgttttcttcgtcgatgccgagaatgcggaagccctccacgcgctgaccgtgcgtgagatcctcgcgcagcacaacgcagccgatctccaccggcccctcggtcttcagctcatacacgggctgcgtgggcgtgccgccgatgcgctccaccgtgcacggaatgcggttttcggtcgtctcgcgtatgaggtcgccgagctccttcaagcgcttcacgtcgcgttcatcgaacttgccctcgcgcgtcggcggtacgttaaggttcaggcaggcgtttgcgccgcaggaatgcaggtaggtattgtacagtctctcaagcgaatgcggttcctcgttttcgtgccagaaccagcccggacgaatggacatgtcgatctccgccggtgcgaaaacaagccccttcgagtagaggatgttcggcatggtgccaatctcgcggttcgtgttgtacatgtagctcaaagagccgtcttctgccatcggacccgcgccggtctgcacctcgccgtaaaagcacagctcgctcggcacaacggcccattcggcatggcgcgcctctccggcctcattgccgcaccaccgggtatccggaccgaaatcattgaaaataacggcgttcggctgatacttgcggatgagctcaaagtaacgcgggaagtcatattcctgctttttgccgttttcgccctcgccgcaggcgttatcgaaccatacgcagaaaatatcgccgtagccggtcagaagttccgtcagctgattgcagaagtaatcgttatattccggcgtgccgtaatattttgagttgcggtcccacggagaaagataaaaaccgaacttgatgccgccgcgcttgcaggcttctgcggcttcacgcacgacgtcccccttataagggctgtttttcacgctgtgctccgtgtatttgctcggccacaggcagaagccgtcgtggtgcttcgccgtgaggatgagtcccttgaggcccgcagacttcaccgcttccacccactggtcgcaatcgagcgcggtggggttaaaaatcttctcgtcctctgtgccctcgccccattcgcggtccgtgtaggtgtttacaccgtaatgcacaaacgcatagcgttccatctcaaaccaatcaagctgtcgtttagacggcaccacatgcgccgcctctttcaaaaattcaaccataccgtcctcccgaaattcggttttgctgctctgctcgtattatagcacaaccgcgcagaatgtcaaaaataaaaatgcggcgcagaaagctcgcttccgtaccgcatttaatcgttattttagaacgtgacgcgcaccgtagtgcccttgttcggctcgctttcaagcgacacgcgcgcatggtggaacatggcgccgtgctttacaatggaaagcccaagtcccgtgccgccaatctgcttggagcggctcttatccacacggtagaagcgctcgaacacgcgctcgcggtcggccgccggaatgccaatgcccgtatcgctgacctgcatatatgcgtggccgccttccgtgccggtggagatcaccacgcggccgccgggccggttgtactttacagcgttatccgcaaggttatacagcatctcgtctaaaatgtacggcacgccggtgacgaacgccgagctgccctgcaccgagatgacaatactgttctgctgcgccgggattttcaggcggcaggccacctcctgcgcaacggcgtaaaggtctgtatcggcgcggcccagctctaccgcattttcgtcgagctttgaaagcttcaaaatatcctcaacaagcgtgataagccgctgtgcttcggtataaatgttgttcgcaaagcgcggcacatcagcactcttgacgagcccgtccttcataatctccgcataacccgaaatagaagtcagcggcgttttgagctcatgcgaaacgttcgcggtgaactcgcggcgcaggcgctcgttctcttccttttcggtaacgtccagcagcacgatcaccgcgccctgcacgccgttatcgttcgtaacggggttcgcgatgaggctgtaactgcgccccgccagctttgtgatgcgctcgctcgccgtacccgtcagcgcggaatccactgcatcacggaaatcggggctgcggttaaacgccagcacgctctgtgggcggtcgtcctccgggcgcacgtccaaaaggcgcacagcgctcgtgttgtacgaaagcacatcgccctttgcatccaccacaataaagccctcgcgcatgttttcggtgatggcggtaaactccgtctgcttgcggtgcagctcttccattttctccttgatggtctcgttctggcgctgcaagcgcaaaagcagcggcgaaagctcgccgtacacgtcgttttccatcggatggtcaaggtcaatggcgttgaccggcgccacaatctgctttgtgcggtacgtggaaagcaaaatggccagcaccaaaataatgacggagcacagcagcatccacggcaccatgcgctcaatggagccgaacaccgtcttcataccgaccgaaaggcgcagcacgcgtccgtccgagagcatcacagcgtagttatacgactgcacattcagcgtatcggattcacgcacggattcccccgcaccattttctcttgcagcaatgacctccgggcggtcgttgtggttttccatgtttgcggcatccgcaacactgtcaaatcgcaccgtgccgtccgtatcgatgacggtcacgcgcacagactgcgcggcggctgtatcatacccggcggagcggatgtcggaaaggtaatcgtccccgccaagggcgatgccgttttgaatgtagcggctttccgctatggtcgcctttttcacgatttccagcgaatcgtagtacgaaacgacgccggaaagcaccatagaaagtaaaatggaaagcagcgcaatgcacgacatgctgaaaatgatctttttcttcatgcgtctttctcctctttaatcctgtgccagccggtagcccacgccgcgcacggtctcaatgagcgcaccggcatcgccgagcttttgccgcagcgtgcggatatgcacgtctaccgtgcgggtctcgccgctgtaattgtaatcccagatcttcgtgagaatctgatcgcgcgaaagcaccacaccgcggttttccagcagatagcacagcagttcaaattctttgtacgtgaggatcacgggttcaccatcaaccgtaacggcgcggcgcttcacatccaccgcaagcgagcccgctgtaaaaagcttatcctccgctgcgggcttcgcggccctgcgcagcagcgcacgcacacgggagacaagctccatcatgccgaacggcttcggcatgtaatcgtccgcgccgctgtccagcccaaccacacggtcatattcgctgcttttcgccgtcagcatcatcacgggcaggtcggccgtttccgcacccgcgcgcagacgcttcaaaatatgcagaccgtcttcatccggcagcataatatcgagcagcacaagctgcggcagctctttttcaagcgcctgccagaaatcggctgcattccggaagccctcggcttcaaaaccggtggtgtgcagtgtatagagtacaagctcgcggatgctgtcgtcgtcctccacaagatagatcataaacccttaaatcctttctgtgcggctttgccgcttaatcgtgctcgccggtgagtgagaacacgacccactccgcaatattgaccgcgtggtcaccgatgcgttcaaaatacttcgccaccatcagcaggtcaaggcatgtctcgccctcctcgggcttttcagcgatgagtgcgatgatctcacttttcaccttgttaaaaagcgcatccacttcgtcgtccgctttttccacggcgcgcgcaatatcaatgtcacggcgcacaaacgaatcgacgctgttcgtcaccattttcacggcagcgcgcgccatttcggcaatgtgcagactacccggcagcacctctgcgcggatatgctcgaccatttcggcaatatccgaagcctggtcgccgatgcgctccatatctgcgatcatcttcatcgcggcagagatgagacgcaggtcttttgcaacaggctgctgctgtaaaagcaagcgcaagcagattgcttcaatctcgcgctccttgcggtcgatttcctgttccgtttcgtccacggcgcggcgcagcgcttcgtctcgtgtcacaagtacctttgccgcctgcgaaatgccgtcttcgcacagtgcgcccatgcggataagctctgtattgagcagctccagctgctcgtccaaacgatttctcattgtagtcacgttcctttctgcaagccttaaccgaatctgccggtgatgtaatcctccgtgcgcttatccttcggcatggagaataagctctccgtctcgccgtactcgatgacctcaccgagcaggaagaatgccgttttgtccgagatacgcgccgcctgctgcatgttgtgcgtgaccataacgatagtataatcctttttcaattccaccgcaaggtcttctatcttggaagtggagattgggtcaagggcgctggtcggttcgtccatcagcagcacctccggctccacagccaacgcgcgtgcaatgcacagtctctgctgctgtccgccggaaagccccagcgcgcttttcttcagtctgtctttaagctcgtcccaaatggcggcgtttcttaaagaacgctccacaatgtcatcgagcttcgccttagagcggatgccgtgcgtgcgcggtccgtaggcgatgttgtcgtacacgctcatcggaaacgggttcggcttttggaacaccatgccgatacgttttctcaaaaggttcacgtccatgccgtggtagatgtcctcgccgtccaattttactgcgccggtaatccggcagccctcaacgaggtcgttcatgcggttcaaggatttcagcagcgtacttttgccgcagccggaaggcccgataaacgcggtgatctcgttcggctgaatttccatatggatggatttcagcgcatggaaatcgccgtaatacaaattcagatcttcgattgctaatttacagctcatatcgtttcccctatctttttctggtgtgattttctaaaaggctcgctttagccctgtttcttcgtaattttcttcgcgacgaacgaggacagtgcgttgatgccgatgacgataacaagcagcacaaccgctgtggcatacgttttgtcgacgtgcaggccctcgctcgaaagcacatacatgtgcacggagagggttcgcacggaatcgaacagaccgccgcccgcctggcccggcatctgcgccacggagcccgcagtgtacatcagcgccgcggattcacccacaacgcggccaatggccaaaatcacgccggacaaaatgcccggcacggcgctcggcagcacgatgtgaaacaccgtgcgcagtctgcccgcgccaagcccgaagctgccctcgcggaaggaatccggcaccgagatgagcgcttcctccgttgtgcgcatgatgagcggcaaaatcatgatggcaaccgtaaacgcaccggcaagcaaagaatagccccagtgcagcgccgtcacaaagcacagatagccgaacaggccgtacacgatggacggaatgcccgaaagtgtttcggtcgtgatgcgcacgagctgcacaagtttgttgccgcgctttgcgtattccacagagtagatcgccgcgccgatgccgagcggcagcgcgataacgagcgcgatgagcgtcatgacgatcgtagaaatcagcgccggcatcagcgacacgttatccgatgtataggtgaacgagaaaaggtccggcgtgatgtacggaatgcctttcacaagaatgtaaaagataaggtataaaagcgtcagcatcgtgatgagcgccgcgccgcagacaagcagcaataaaataagcgaaagcggcgagcgcttataggcgcgcattttatccttgaaggtgagcttgttgatggtctctgccgccacgggtttacaggtacgttccatagtcatttccgtatcctttccgggtcatgccctgtcttttctgcgcagaagcgagaacgtaacgttgataattaagataaagacgaacagcacgaccgccgtcgcaatgagcgcctcgcggtgcaggtctgtggcatatcccatttccataacgatgttcgccgtcatggtgcgcacgccatcgagcaggccctgcggcatacgcgccttgttgcccgccaccatgacgaccgccatcgtttcgccgatggcacggccgataccgagcaccacgcccgccaaaatgccggaacgcgccgccggcaatgtcgcaaagaacacgctgcgctcatggctcgcgccgagcgccagagaaccttcatagtagctgtccggcacggcgcgaatggcactttccgaaacgccgatgattgtcggcaagatcataatgccgagcaaaacggacgctgtcagcatcgtgttgcccgccacgccgaaaatgttctgcacaagcggcaccaaaacaacgagaccgaagaagccgtacacaacggacggcacaccggccattagctccgttgcaggctttaaaatcttataaagacccttcgggcagaactttgcaagaaaaaccgccgtcagaagtccaatcggcacaccgatgatgattgcgcccgccgtgacgtagaggctgccgaggatcatcggcagaatgccgtagatgtcgttgcccggcttccacttagtgccgagcagaaatttaaacacgccgatcttaccaatggccggaataccgtttgcaaacagaaacacgcagatcaaaacaacggcaaagatcgatacgcaggctgtgagaaaaaagaggatatgcatgagaagctcttttatgttgctccacttcacggtttgcacgcacctttcaaactttcaaaactactttattggcttccttgcgaaaagagccggacctttccgcccggctctcctgcgttttatggattgtttcttacggaagctcggaccaatcggtcgtttcgccggtgtagatgctcaagacctgctcgctcgtaaggccggtcagcgtgttttccttgttgacgataacagcgatgccgtcctgtgcgatgacagtcggggtaagaccggcttcaagctcgctgtccttcagctcacgggaagccatgccgatgtcatacgcaccgtcgatggtggaggtcatgcccgtggtggagtcgctctgctgcacttcaacggtaacgtccgggttcagcgccatataagcttccttcagcttttccatgaccggcgtaacagaggaggaaccgccaacaacgatcttgccggaaacgccggatgccgcataagccggagccgcatcatcaacggtgatataaccgttttcggagacgaccttctgaccgtcagcgctcatgatgaagttgatgaagtcctgtgcaacttcgcttgcctcgccctttgttgcaatattgaacggacgaacaaccttataggtgccggcctttacattctcaacggtcggcgccgcaccgtcgatctccacggctttgacaacgctttcgtcaagggagccgagggagatatagccgatggccttcgggttgccctgtacggtggtcatcataacggaggtgctgttcgtaatctgcgcatcatccgtcgtcatatcttccttttcgccagcgtcgttcttctgctcgatgccgaacagctcgatgaacgcgccgcgtgtgccggagccgtcttcacgggaaagaacggtgatttccccggtcatgtcgccgccggtcgtttcttcggaggaagtgctctccgcagatgcagcggaggattcggaggacggtgtctcggaggaagcggagcttgctgcgccgccggagcaagccgtcatagctgtcatggtgagaagtgcggctgcaagaaccgcggtgatctttctgagtttcataaattactctttcctttcgggagctttctgctcgccttttatcttttcctttggtttacaagcgaaagtatagggccgttttgtaaactcaaaaagaagtcttgtgtaaaatccacgtaaaactgcttaacatttcgggttttacaaagcaaaaatcaaaaagaacattgaaaaaaagcccgttttgcggtaaaataagcctataaaacatggaggagtttttatgcgcagcgaaaaagaaatgtatgacctaatcctcggctatgcaaatgccgatgaaaatatccgtgccgtcatcttaaacggttcccgtgcgaacccgaaccgtaagcccgacccgttcaatgattttgacattgtgtacctcgtgcgcgatcttactccgtgcaaggaaaaagcctattataaagatttcggcgaaatcctcgtctgcgagcgcaccgatgaaaccgagctttttaaagagcactttcccgagttcgtatgctatctgatgcagtttgcggacggcaaccgcatcgacctgaccgtatcgagcatcgaccgctgggaagtatattgttatgacgaccgcctttccgtcgtattattagataaagacaacgctctgccgaagctgccggagccgaatgagagcacgcactacgtcaaaaagccgaccgagcgtatgttttttgactgccgcacggagttctggtgggtctcgccgtatgtctccaagggcttgtggcgcggccagctcctgtttgcgcagacgcacatggaaagttgtattcgcaaaatgctgctgcaaatgatgaaatggtacgccggaacgctgcatgggtttgattacagcgccggcaaatgcggtgacgccttaaaagaccttctccccgcagacatctggaacggctaccttgaaaccttcgccgtatgcaccgaagaagacatttggcgcgcactgtttaaggcaggcgagcttttcacggagctcaccaaacgcaccgcaaaagcgctcggctttacggtcacgggcgaatacgaccgccgcgtcacaagctttttaaaatacacaaaagatttgccgagaaacgccaaaacgctggattttcatattgactaaaagaaaggacccctatatgcagatattatgtatcggcgacgtggtgggcagccacgggtgcgactttctgcgccgcactctccccgccttcaagcgcactaagggcatcgatgtcgtcatcgcaaacggcgaaaactcctcggacggcaacggcatcacccctgcctccgcaaaccacctgctcgatagcggcgtggatatcatcaccaccggaaaccacacctaccgccgccgcgaattttacgattatatcgatgaaagcgactgcgtcatccgccccgcaaacttcccgccggaagccccgggtaaaggcatgaccgtcttagatctcggccgcacgcagatcgccgtcatcaacttaatgggcaatgtataccttgacgagcacctcgcctgcccgttccgcacactcgatacgcttttaaaaacgcccgaccttccgaaaatctgcatcgtggattttcacgcggaagccaccggcgaaaagcgcgcgttcggctattatgcagacggccgcgtctccgctgtgttcggcacgcacacacacgtgcagacggccgatgaaaccgttctgccgaagggcaccggatacatcaccgacgtcggcatgaccggccccatcgagtccgtactcggcgtcaaagcggagctcgtcatcaaaaagcagataagcaaaatgcccgtgcggttcgattttgcggacggtccgtgcaagctcgactgcattttgttcgatatcgatgaaaaaacaggcctcacccgcagcacagagcgtttctccctgcgctaaacgtgatttctgtgcggtattacccttgttttttcccgcaaactatggtatagtgtagtttgaaaatacatgcaaatatctatcgggagccggtttttcgccttccgaacgtttttagacaggatgtgtatgcagtgattacaggtaaacagcttcgcgacgcagtcatctccggcgcgaacagcatattgaaaaaccggaaatttgtggatgacctcaacatcttccccgttccggacggcgacacgggcacgaatatgtccatgacgatcggtgcaggcagcgacgccatgcaggcgcttgcggataacgaaacaaccgctaaggtcgcaaagacggcggcttccgccatgctgcgcggcgcaagaggcaactccggcgttatcctttcccttctgttccgcggcttctcgaagggtctcgaggacaccgtagaagcagacggtacacagctcgcagcggcgctcgccatcggcgtggattccgcttataaagccgtcatgaagccgactgaaggcaccattttgaccgttgcccgcgtggcggcggaaaaaggcgctgcggcagccgagatcgacaacgaccccatttacgtttgggacgccatctgcatgggcgcggcggaagcactggccaccactccggatcttctccccgttctgaaaaaagcaggcgtcgtcgatgccggcggtcagggcctctgcatgatcttcgatggcatgatgcaggttttcaagtacggtgagatcgtcaaaaccgacatgaccgaagccgaaaaggccgaggagaccgcccagttctttgcaagcgttgcggcggaatttgacagcgagatcaacttcacctactgcacggagttcatcgtcggccgcgacccggaagtcaccaccgagccgaacgagctgcgtctgttcctcgaaaccctcggcgactgcgttgttgtggtcgatgacgaggagatcatcaaggtgcacgtacacacggagcagccgggtgtggcgctcacaaaagcgctggaattcggttccctgctgaccgtaaaaatcgaaaacatgaaagagcagcacaaaaaagctgccgaactcaataacgcaaaccgcgcggcttacgaagcggcgcaggccagcaaagaggaaaaggagaccttaaagcccgtttcccccgaagaggaactcggctttgtttccgtagcggcaggcgacggtctgcgtgcactctttgaagaactcggctgtgcacaggttgtcagcggcggccagacgatgaaccccagcacggaggacattgtcgaagccgttcttgccaccccggcaaagacggttttcgtactgccgaacaacaaaaacatcatccttgcggcagaacaggccgtgccgctcgtcaccgaccgcaagattatcgtcgtaccgacccgcaccattccgcagggtctctccgcacttctgagctttgacccggatgcttccgcagacgaaaacgcttctgccatgctttccgcagcggaaaacgtcgcgaccggcacggtcacgttcgccgcacgcgattccgaattcggcggcttcaaaatcaaagagggcgacaccatgggcatgacgaacggcaagctcgagtttgtcggcgacacgccggtgcgttccgtctacaaggtcgcaaaggcgctgatgaataagcacacctcttttatcacgctcatttacggcgaaggcatcaccgaggaagaagccaacgaagcactgcgtctcatcaagaacaaggcaggcgacggtgtggacatcaacctcgtaaacggcggccagccggtctactacttcattctttccgtggaataatttcaaagcagcttagggcggggctttatgccctgccttttttcgttttatgtcggaggtttcatggcgtctttatttgaagcggacattgcgtctttaaagggagtcggcccaaagcgtgcggagctgttccgcaagctcggcgcgcccacggtgggcgatctgctgcgtctctatccccgcgcttatgaggattggcgcgacgcggtgcccatccgcaatacacgcttaaacgaagtgaatatcgtaaaaggcacagtgctgcgccgtcctgtcgagcagcgtatccgcggcggcatgacgctttacaagacgaccatcacggacggcgaagacgacatgcagctgacatttttcaataaccgctacattacaagtctgctcacggagggcgcggtctacgcgtttcgcggcaaggtaaccggcacgttcatgcgccgcgaaatggcctccccggagttcgttcccgaaagccgcatgcaggacatggtgcctgtttacccgcagacgagcggcctcacctctcgcatcatcgcaaacgcggtaaaagaagccctgcgcctgctccccgagaccgtcaaagacccgctgcccgatgcgcttcgcctgaaatacgcgctgtgccgcctcgaatacgcgctcaaaacgatccactttccgaattcgcccgaagcgctttccacggcgcgcagacgactcgtgttcgaggaactgctcgtcttgcagctcggcatggcggaaatccgccgcgcaggtgtgcgcgaaaatccatatccgctcaaaaaggattatacaaaagagtttgccgccctgctccccttcacgatgaccggcgcacagcagcgtgccgtgcaggacggcatccgcgacatgcagggcccgcacccgatgaaccgcctcattcagggcgatgtcggcagcggtaaaacagctgtggcggcggcgctgtgccacacggtcattcaaaacggatttcaggcggcactcatggctcctacggaaattctggcggcgcaacactacgagtccctctccaatctcctcgctccctgcggcatcaaaacggtgctcatcacgggcagcatgcgcgccaaagcaaaacgcgaagccattaagggactcaagaccggcgagattcagcttgccgtcggcacgcacgcactcatcagtgacggcgtggagttctcgtccctcgcgctcgtcatcacggacgagcagcaccgcttcggtgtcaatcagcgcaccgcgctcgcaaaaaaaggcaacttcccgcacacacttgtcatgagcgccacaccaatcccccgcaccttggcgctgatgatttacggcgacctcgacgtttccgttctaaatgagcttcccccgggacgtcagcccatcgaaacgtatctcatcgacccgccaaagcgccgccgcgcattcgggtacatcaaaaagcacatcgacgagggacgacaggcgtacatcgtctgcccgcttatcgaagagggcgaaagcgacgcggcaagcatcgcggcgtatgaaaagatcgtgcgcgattacttcggtgacatgcccatcggcattctgcacggcaaaatgaagccgaaggaaaaggacgccgtcatgaccgattttgcagaaaaccgcacgaaattattattgtccaccacggtcgtcgaggtcggcgtggacgtgccgaatgccgtcatcatgatgattgaaaacgccgagcgctacggcctttcgcagttacaccagctgcgcgggcgcgtcggccgcggcaaatacgcctccacctgcattctggtgacggaagcacaaaacgatgaaacagtacagcgtttaaggctcttttgcagtaccacggacggcttcaaggtcgcggacgaagacctgcgcctgcgcggtccgggcgatttcttcggcgagcgccagcacggcctgccgaagctcaaaattgccgatatgttaaacgatatgcagattttgcaggaagcgcagcagtgcgccaaagagctgaccgagcgcgacccggagctcagttcccccgccctgcgcggcctgcgcgccgaaatgcgccggctctttgcatcaaataacggcacagtaaccctataataaaaacaaaacagcttccgtttggagaaatcccaaaacggaagctgtttttaatttttatctctcgtaaaatactctttcaccaaaatcgcaagcccaatgagcgtaacgataaccgcaagcaccagcggccggttcaagccgacctcggagatagtcgagaaaaactgccccggcggcgttgaccaaccgcttacaaggttcatgccgcaggcaataaagattgccgcgccccatatcgagccgataagcgccaaaaatccgccgaccaaaactcttttcaatgtgcctaccccttttattccatgataagctctttgtcctccggcagcgtaaacggcaccggcttcggctccgtctggtaccaatatgccacagacgtgtagtcgtcgtagcgcgggcccgtccagccgaggttatcaatcgtcattttaaagtcctcatcgaaataaaccgggtctttcacgtgccagcggtacagcataaagcgcttttgatggttatacatttccttcgtgtcgcccaaaatcgcatacaagcccgtataaagcccgctgaacgtctggtagcggttgaggtaaatgtcattgccaaagccatacgagccgccgaagtaatcctccgtgcccgtgtagttcatcgtgggatatgtgtcgccgtcgatatacattttggcttcaccctccacccagcaggtgttgtgcccgttcatgccggaagccagcgtcacgcccgcaaagcagcccttgccgtgcacgccgtccaagatcacatacgagcgtcccttctgcacagggtgctcctgccgatatgtcgcatgaaaatagccgctgttttcgggaatctctccataccatccggaaatcatatagaaaagcgtctctggcttttcaccgcgattttccattgtaatacggcagtgttttctgaacggcatttcaaagtagctgttgaacccgcgccccggcgcgacgagcatcgtagctgagttcaaaaccgggtaattgccgtcgcggtcagaaaaattctcgtcatacgcgcaaccgaaaaatgccgaaaacggtgcttccacggacggctgttcattgttttcccagtagattcgcagaataaacgagtgtcccacgtaacccgtgaaccacatgtgcgtcaccatgcccgggccgtccgtgtcacacagcgtaacggtctcgccgggctgaatttgaatgcatggacttagcttttcacagtccttggcgcgtgtgccgccgccttttgtgcctgttggattttctgcggaaaacccaaagtttctgcggttttccattttaaaaagtgtcatgaaaatgcctcctttatttttgttagagtttaatactaagcatttcttcaattgaaccgagtgccgcgcgcccctcataaagtccctcgtcatgtaaagcaagcagcgcgggaacctccgcctttgtgcggctgacgttgagcggctttaacggacgaatgatgaccgccctgcccgctttttcaagcttttcacacaacgccaactggcggttataaatctcatgccgcgtgcgcatcgcttctgccacagcagggtacttgcgaaacgccgctttcaaaaacgccgtgtgcccaaacggttccttttggtagcccttgttgcgcgtcaaaacgatcacatggaacgtgttgccgtctgcaagcgacttttcgattggaatcgggtcactgatgccgccgtccaagaggtcatagcccatataatgctgaattttcgtgatgagcggcacggagcacgatgcacgcgaagccataaacggcgcttttagcgtgtccttttcaaaccaaacggtcttgccgtccgcgcagttcatcgcgccggtcaaaaagcgcgtgtcctgctcatgaaacttgtcccagtcgaaaaaaatgtgcttttccggcaccgtgccgaaaatataatcaaagtcgaacatcgtgtgctttgtcaaaagatttcgcgtgctcacatagtcgggattcccgacatagtgttcaatgatctctcggctgcgccccggttggcccgatatgtacgaaagcgcattcgctgcgcccgccgaaacgccgataatatacggaaacagcagatctttttccatgaacgcttccatcacgccgcaactgtaatagccgcgcaggccgccgccctctaaaacgagcgctgtgccctcaggcagccggcgcgaaagcgtcttgccgggaatcggctgcaatgtataatcggtcacaaatctcaccctctttgcgcttatcatacaatatcaagtttaaaaagtcaaggaggaaagccgcagcttcctccttgcaacaaaacagttcagtttagagtttcaagcatcttttcaagctcctccgggctccaatcttcgccgagcgcaaacacggctttgtgaaacacaaaaagctcgtcttcgcccaactcaccgctttcgagcttgcaaagcatccccggcgcgatttcgatcaaccgttcggtgatggcaaatttctgcttccgcacagcctcccgcgcgttgcgcacagtgccgaaatctaaatcgctcgtgctgccgcacggcatggcgcaatacgcacagtccggcgcaatgcggtttttctccgcgtgggcgcacgccagcatgttctgcaacgccgtttcatcatcctccgcaagcgcggcaaagccctcaaaaagcactctgtccgtttccgcggtcttcgcgtttttctgctccgcgcggacaacgcccacaagcgcccccagcagcgcatcccacgtttgatttcccgtcctcattctacgagactgccgtcggtcgcgatgaccttcacctgccacgggatgaacttgccgctcgccttcagtgcgttcactgctgcgtgctcaaggccgccgcagcacggcacctgcatgcgtacaattgtcaggctcttgatgtcgttctgacggatgatctccgtcagcttttcggtgtaatcgccctcatcgagcttcgggcagccgataagcacttttcggttgtgcacaaagtcgcggtgaaaatcaccgtacgcatacgccgtgcaatccgccgcaatcagcaggttcgcgccgtcaaaatacggggcgcggatcggcgctaatttgatctgcaccggccactggcgcagctcggattcaatcttgccgctgaccgcactgttatccgtatttacgggctttctctcaatagcgcgtgccatgctgcccgggcagccggtgaacttcggcgtgccgagcttttctgccatttcctctgcctctttcttcgcggctttctctgccatagccattttcacggcttcctcgtcaaacgccgccgcttcgcgctccacaaaggagattgcgttcgtgggacatgcaggcaggcagttgccgagaccgtcgcagtaatcgtcgcgcagcagcttcgccttaccgtttacaatgccgatggcgccctcctgacaggcattcgcgcacaggccgcagccgttgcatttttcttcatcaaagtgaacgatggtgcggatcatattcaaaattccttccaatttttaaattttgcaaaagccacaaggttttctcttgactttacgaacacagtatactacgattaggctgtaaagtatgttgttataacaacgaagattgaaaaaaggaggctattttacggattacagcatcttagggcgctcgccgctgtttcggggcatccccgcaggcgatttcggcgttttgctcgagcacctaaaagcggaaacgcgcagctataaaaagggcgatctcatctgccacgcgggcgagcacacaaacgcgctcggcatcgtgctcacgggcagcgtgacgattgaaagcgacgacattttcggcaaccgcagtgttctcgataaagtcggtcccgggcaggtctttgcagagacctatgcctgtgtgccgaatgaaccgatgctcgtcaatgtcgccgccgcagaaaactgcaccgtgttgtttttgaaaaccgcgcagatcctctccccgtgtcccgtaaattgcaggcaccacggcaagctgattgaaaacctgctgctcgtcagcgcgcagaaaaacctgtcgctttcgcgccgcattttccacaccgcaccgaaaacgatacgcgggcgactcatttcatacctgtcgtttcaggccatccgcgaaaacagcgacagcttcacaatcccgttcaatcgccagcagcttgcggattacctcagcgtagaccgcagcgcgctttccaaagaaatgggcaaaatgcgcgacgaaggcattttaaacttctccaaaaatcattttgaactcaagcgcacaagctgacggaaagcgagacgaataaagtctttgttcaaactttcttcgagaaagtttgcgggtttttagggcaggccctaaatcgtcgtccgcagacgacgaaatctttttgcgttcgcaaaaactaggaaggtagtttggaacgtccggaggacgttccaaacttaggaaacccagttgcatgggtttcctaaaggacttgccaaagcaagtccttagaaaaatcaccacctcacagtaaattatagaaaggacttatctctatgaaaaacattttcttccgcaccacgtctctttgggcgtccgtcctttacatggcgctcggccttgtgctcacgttttggccgggcatgtccggcaccgtcttttgctggggcatcgccgctgcactcattttgtacgccgcacatagcttttggtattttataaaagccagaaacctcggcttcactgcaggcggcacgctcgtcatcggcattctctgccttgcgttcggtattttctgcttttcccgcccgtacgtcgtcctctctttcctgcccatcgcgctcggcatcatgctgcttgtagacggcatcggaaaaatgccgctcgccgttgatgccctctcggtgtacagcccctaccgcttctgggtactcatctccgccgtactgccgctcattctcggcattgtgctgctcgtaaatccgttccgtgccgcaaaagccgccatcatgttctttggcatcagcattttagcagacggcctctttgagctcatcacctacatccagcagcgccgcgcagaaaaagccgagtacaaggatatccgctaaacaacctttttgcaataacaggcaacctatactgtttgaccgaacgcacgtcgcgtggtatagtatgcttgtaatattctgtatggaggtacaaacatgaacccgaacattgaaaaggcgtttcacgattacgaagcgctcatcgcaaaagagaacaagcctgccgctttttacaacggcatttacacgcgttacgagaatcctgtcctcacccgcgaccacattccgccgttctggaaatttgacctgaacgaggagacaaatccgctgggtcttgagcgtctcggcgtgaacgccgtcatgaactccggcgccatcaagctgaacggtcagtactgcctcgtcgcccgcgtagaaggcaatgacagaaaatctttcttcgccgtcgcgcgcagcaataaccctgtgcagggcttccgctttgatgattacccggtcatcctgccagacacctcccccgaggaaacgaacgtctacgatatgcgtttgacgcaacacgaagacggctatatctacggcgtgttctgcagcgaaagcaaggataagaccgtgaacgacctctccgccgcattcgccgctgccggcattgtccgcacaaaggatctcgtcaactgggagcgcctgccggacctcaagacgaaatctccccagcagcgcaactgcgtgctgcacccggaattcgtcaacggcaagtatgcgttctacacccgcccacaggacagcttcattgaagccggcgaccagggcggcgtcagcttcggtctatgcgacgacatcacaaacgctgtcatcgacgaagaaaaagtcgtcagtccgcgccgctaccacaccatcaccgagtccaaaaacggcgccggcgctgtgccgatcaagaccgaaaagggctggatccaccttgcacacggcgtgcgcaacaccgcagccggcctgcgctacgtgctgtatgtcttcgtgaccgacctgcaggaccctgcaaagctcatcgcagaaccgggcggcttcttcatcgccccgctgggcaaagagcgcgtcggcgatgtttccaatgtcgtgttcacgaacggtgccatcgctgatgacgacggcaaggtctacgtctactacgcttcctccgatacacgcatgcacgtcgcggagacgagcattgcacagctgctcgactatgcgttcggcaccccggccgacccgctgcgttccgcagactgcgtccgccagcgctgtgccctcatcgagaaaaatctcaaatatatgaaagcgcacaaataatttctcttaaagcataaataaacgaagcaccgtgtccttgtgaggcacggtgcttttgttttgactatattcgtttacttcgtaattttcagctcgccgttccagaccttgctgccgctttcctcaacgtaaagctccactttactctcttccggcgcaaactgcattttgcggttccagatgctcagtgcgtcacagtcaagcttcagttctaccgtcttcttttcgccgggctggagatacaccttctcaaacgctttcagctcgcgcacgcggcggacgattgtgccgctcacgccctgaatgtacagctgcaccgtcgcatggcccgctgtgctgccggtgttttccacctcgcacgtcacggtatgcgcttttccgttttcaagtgccgcaatagaaatttccggcgtgccgtcctttacggtcgtcttgaacgtcgtgtagtgcaaaccgaagccgaacgggtacagcggcgtgttctccaaatcgcggtagcgcatcacatcgtaggaagcgcgggcgttgtagtacaccggcagttgtcccgttgtacgcggcacagaaaccggcaggcagccgcacggatctgccgcgccgctcaaaacttccgcaatggccgtgccgccccacgggcccggatagaacgaccacagcaccgcatcgctcttttccgcgatctcggggatagcatgcgggcggccggaaatgagcaccgtcacgaccggcttgccgctttcaaacacggcatttgccagctcgttctgcgcgccaggcagacgcacatcagaggtatccacgccctcgccgcaatccatctgcaatttcgtaccgacaattgccgcgccgttcgtgtcaaactccgcgcccgcaaagcggcttgaagaaccacccagcgccaaaatgacgaggtcgctctcctccgcaagcttctccgcctccgcaataccggaagtatcgtcgtcgcagatcgtgcagccgagcgcatagcgtacatcggcgttcttaaattcgttccggatgccgtcaagcaccgtcacacccacaccgtcacgcagcggcggtgtgtagtcgccaagctgctgatacagcgcgtccgcgttcgggccaatgaccgcaatacgcagcttcttctcttttttcagcggcagaacaccgttgtttttgagcagcactgccgactgccgcgcaatttcaaggctctgcggaaatgttttcggcacattgtattccgtcagcggtttttcttcaaggtacgggtgctcaaacaacccgcgcgcaaatttcagctccagcacgcgcagaaccgccttgtcgagcgtttcttcggaaacgagcccgcgctccacggcttcttccaggtgcgggaagctgtcgtcccacaggctcacgtccacgcctgcatttaaagcatacgcgccgtttgccgccttgtcgttacccgtcagcatatcgagacggtcaatcgctacgccgtccgccatcacgatgccgtcaaaaccaagcccctcgcgcagcacgtcctttaaaagccactcattcgcatggcacggcacaccgtcaatctcattatatgctgccatcacacccgtcgcgcccgctttcacggcctccttcatcgcgggcagatgaatttcgcgcagctcgcgctcgccgatgcgcgccgcactggcgtttacgccgccggtcgtttctccctgtgcgcagaagtgcttcgcaacaacctccaaaccggcgctcgcacagcccttcaccgccgcagcagcgttctgaccgcagaggtacggatcttcgccgtagcactcttcgcttctgccccagcgcgggtcacgcagaatgtccagcatggaaacgagcgcaaaatccacgcccatttcttttttctgttcgccaacgaccttaaagccctcttcaacaagcttcggattccacgccgcgcccatgccgaggttcaccggcagcaaatagccgtcgagcgcctgatggccgtgcgggcactcgctgctcatcagcatcggaatgccgaagcgagagtgctccagtacatagtgctgcgccagattataggcgcggattgcgttcacgccggtaaggccggtcgtataatccttgttcgcccacgggtctgcgcggtataagccgtaaagcacaccgaggccgccccatttttccacttcttctttaaagctgtccgcaagctccacgtgctcgccgttgcaggtgtagctctgaaagccgtaaagcttctgattcacctgaccgaccttttcgcgcagcgtcaggcgcggcagcaggtcttccgcacgctctttcggggaaagcgcactgtctttaaatttttctttcatttttattgtcctctccattgaaactgtcaaccgatacaaaactcagttgtgcgtacatgttgaagcatagcacacctttgcacggttgacaaggaagaaaatcaaacgaatttttcgtacagctttcacggaatttcatcactttcctttttgcatatcctgtgttatactataaaaaagcatccatgaccgaaggagcacccctatgaatccaaaaaaatttcccatgcccaccggcatgctcttaaaaaccgacgacgaagaaaaattccttccgtttcaaaatccaactacctataaagacatcaccgtcgagttaaagccgaacggcgaagctctgcgcgtatacgtcaccgctgacacaacgcccgtgcagcgcgtcacgctctatttcgcggacccgctgcccgaaaaagcgcaggttttaggcggtgtttgggagcgcggctacggcgactatgaatggcgcggttatgtcccccatcgcgtcatgccgtggtacttcttcctgcagagcggcaacaagaccgaagccttcggcgtgcacacgcagcccgctgccatgtgctggtggacagccgaaagcaccgggtacagcgtatatctcgacgtgcgctgcggcggtctcggcgtgcgcttaaacggccgcacactctgcgctgcggagctttgccgcgcagaatacgaagacgccgacggctttactgccatgggtgaattcttctccgttttgagcccgaaccccattctgccgaaattccccgtctacggtgcgaataactggtaccatgcctacgggcatgccacggaagatgacgttctgcgcgaagcgaaggccctcgccgaactcaccgaggggctcgcaaaccgcccgtggttcatcatcgacgactgctggcaaattgaccgtgcggataactacaacggcggcccgtggcgcgcgggcaacaagggctttccggacatgccgggcctcgccaaaaagctgcacgaatccggcatacagccgggcatctgggtacgtttattatgggatcacagcgaaagtattcccgcctcttggcgctcgaagcgtgaccccgaatacctcgacccctccgtgcccgaagtgctcgaccacatcgcggaggacatccgcaccgtctcaagctggggttacaagctcatcaagcacgatttcacttcctacgacgtactcggccgttggggctttgaaatgggcgacgagctcacggacagcggttggcgctttgcggacgagacccgcacgacggccgaaattttaattgaattatataaacgcatcttagccgccgcgggtgacgccatggtcatgggctgcaactgcttcggccacctcggcgccgggctcatgcacctcaaccgcaccggcgatgatgtcagcggcaagctctgggcacgtacgcgccgcatgggcatgaacacattggcattcaccgcgccgatgcacgaccgcttcttcgccattgatgccgactgcgtaccgctcaccgatgccatcgacgaaacgctcggcatgcgctggctggagcttgtggcaaaaagcggcacacccacgctgctctccgttccggcttcctatttaaacagcgagcgcaaagccatcatccgcgacgctttccgccgcgcaagtcagccccagcccaccgcgcgcccgctcgattggcacgagaccacctgccccgccgtgtggaagctcggcgaggaaacaaaacactttgactggacagagccgtgcggcattctgaccggcagcgtataaattcttaaggacttttcatgaacaaattagacagaacggcttttttgcctgtttcaaaagaagatatggcggtacgcggcatcgaacagctcgatttcgtgtacatcagcggcgatgcctacgtcgaccacccatcgttcggcacggcgatcatctcccgcattctcgaagcaaacggtttcacggtcggcattatcgcacagccgaactggcgcgaccccgaaagcgtgtgcacactcggcgagccaaaacttggctttctcgtttccgccggcaatatggattccatggtgaaccactattccgtcgccaaaaagcgccgccgcagcgactttttctcccccggcggcaaaatgggcctgcgcccggattacgccgtcatcgtatattccaacctcatccgccgcacgtttaagaaaacgcccatcatcatcggcggcatcgaggccagcctgcgccgccttgcgcattatgattactggtcggacaaaatgaagcgctccgtcctgctcgattccggcgcggatatcctttcctatggcatgggcgagcgttccatcgttgagattgccgaagccctgcgcagcggcatccccgtgcaggagctcacgttcatccgcggtaccgtgtataaaacgcacatcgcgcccgacggcgacgacgtgctccacctccccggcttcgataagatttccaccagtaaagagctgtacgcgaaaagcttttacaatcagtatctcaacaccgacccgttcacggcgaaaacgctcgtcgagccctacccggacgatcacctgttcgtcgtgcagaatcctccgcagatgccgctttcaaccgaagaaatggatgacacctacgccctgccctatacgcgcacctatcacccggattacgaagccctcggcggcatccccgccattgaagaagtgaaattcagtcttgccagctgccgtgggtgcttcggcgcatgcagcttctgcgcgctgacgttccaccaaggccgcatcattcagtcccgcagccacgaatcgcttttggaagaagcgaaaaaaatgaccgaggatcccgattttaaaggctacattcacgacgtcggcggccccacggcaaacttccgcaagcccgcctgcaaaaagcagatgaaggtcggcgtgtgtaaaaaccgccaatgtctgttcccggagccatgccccaacatggagatcgaccacacggattacgtctccctcctgcgcaagctgcgcgcattgcccaaagtgaaaaaggtctttgtgcgctccggcattcggttcgattacctcatcaatgacaaagacgaaacattcttccgcgagcttgttaaataccacgtcagcggccagctcaaagtcgcaccggagcatatttccgacggcgtgctgcgcatgatgggtaagccgcagaattccgtctatcgccgcttcgtcaagcgctacaaagagctgaacgaagaaatgcacctcaaccagtacctcgtgccgtacctcatgtcctcgcatcccggctccaccttacaggacgccgtaaagctcgcggaatatctgcgcgacctcggctatatgccggagcaggtgcaggacttctaccccaccccgtccacgatctcgacctgcatgtactacacggggctcgacccgcgcacaatgaagcctgtatacgtcgcgcgcgacccgcacgaaaaagcgatgcagcgcgcgctcatccagtaccgtgacccgaaaaattacgaccttgtcacagaagcgctcatcaaagcaaatcgccgcgacctcattggcacaggcaaaaactgcctcttgcgcccccgccacggtgatacccgttttgctcccccaaagcccgccgcaaacagcaataaaccgtttgacggtaaaaacaaaaacggcgcaaagcacggcagaacgagtcaaccgccggcgccccaaagccgccgttggacaggcgagccgcccaaaaagcgcggcaaacgataatgtgagacagcaaaaagctctgcaccgaatttcaggtgcagagcttttgtcattgctttataatttaatacaaacccggcttgcagagaatctcgtgaattttcgtgtcaaggcagtccgccgtatacgccggcgtgatgatacacgcggtgtccgcaccacgcgccgagccgcctacacagacaaccggcttattaagctcaatcgcgccgttatccagcgccatcatggcgatctccacgcaaaccttcgtgccctgtccgaacatgcgcagcgtgtgcgccatgatctccaccgggtacgcgccgctgaatttacgactgatgccgcgttccgcaccgctcaaagcgtgcgcggcatgaatgatatgcacaccggctgcggtcaactccgcgcgccgctcgtccgtcatggtgttcacgccctgctttgggtagccgtacgcctgccccaccatgaccatcggcacatttgtcccgagctcttcctgcattttgatgagttctataagcgtgtcgcccgcgctcgaagccaccacaagcgtcgttccgcgctccttcgcggcgtttaaagcaatgcgcagcgtctccaaagtattctctttgcctttattttcaaaaatcatttttatttacctcgtcagtcatttcgggtcttccaaaatcgcgtagctcacaaatgcaaaccgcatgctgtctccggcccaggagttcacgttgatcgagccctgcccgccaaacagcgacagaattttgtgctgattttcgccgtccgcatccatcagccacagctccaccggcatgttcggcaggtgctcgtgcggctccagctgctccgggccgtaggaaatatagaccacccgttttccgtccggtgatacatgcgggaaccagttgttccgccggttttcggtgatctgcgtctgctcgccgccgtcccgctccatgcgccaaacctgcatcaagccggagtttgtagcgttataccaaatgtactttccgtccgaggaatactccgggccgtcgttaaagccaccctttgtcagtcgcttttccgcgccgccgttcaccgggaccgtatatacgtccacttcctgcctgccgtcgatgtcgcggaaagcgcagtaggccatctccgtgctgtccggcgaccagccgtgcaaaaaactcgggctgttcggcgtcaccagacgaggctcaccgccttccatcggcacgatataaacacgggaagtaaagtctccgttgtcaaacgtcatgtggctgaccgcaagctccgtttcgtccggggagaccacatggtcgttgttgcattggtcgcagctgccggtgtcgagcagccgttccgtgttcgtgttgaggtcataggcatacatgtgcccctcggcgttataaagaatggtatcgctgtttttcagccagttcggcgcctctatcacgcggtcaaaacttgccactgtgcgcaccgcgccagtcttcacgtcgtaaacattcaaaaagctcaccgtatcttttcggttttgggcaaacccgttcagcatccgacaaactttttgaagctctcccggcacatcggagccaaagtgctcctgatcgacaagctgcggaatgtcccgactctgggcaaaacagaagcacgcggcaaggtccacgttgcccgtgcccaccggcacgtcaatcggctcgcggcccgcaccgaaatccttgtggtgcacggactgcacccgcgccgcgttgcgctccaaaaatgcgaccgggtcttctccgccaaactgcacccagcccacgtccacctgtgcgcctaccttgcccatgcaaaggtcaagcaagtgttcatacgccgtcttgcccgcgattttcgtctgtatatccccggcttcattgtgcagcagcaaccgaacgccgaacgtctccagcatatccgccgctttcatatagttcagcgccgtctgctgcaagatgctttccgtactgttctccggcgttttcaccacaaactgcttcagcccggtcttctccgcaatcgccttcagcttatccatagactgtaccaaattctccgcaaaaacatggattgatacaatccgcaggcccatatcctgaatttcttcgacatgtgcaagcagccagtctgcgggccagatcacgccttccgggccgaggattggccccgtcgtcacgcagggttcaatttctgtaataccggcctttgccaacgcagcaagcttctccaaaacctcgccctgcatgttgttgagcgggccgtaaagctgcacaccaaatttcatgctttcaactcccccagattataatgggatcttacgcctccggcgtgtggtcgtattcaaacccgcacttcgagagccattccttcgccatcagcgtcgcgccgatctggttcgggtgcacgcggtcccatgcgatgagcgaggagtgtttatactgcaaaaacttgtcatacaccgcttggaagttcacaaaacggcagccgtattcttcggcaaggcgctcgcagatgtccacatattcctgcattctggcacgcataaaatcgctcttgttcggctccatgtagtacggcgtgcagacgataacgcccttcgcaaccattttcgcctgctcgatcatcgtgcgcaggttttcttcatattccaccgggtcgaccgcctgatcggtgagcgccggagaatcaaactgccgccacacatcattgatgccgatgcagatagacacccactgcgggttcaaggaaagcacgtcgcgctcatagcgcgcaagcaggtctttcgatgtattgccgctgatgccggagttcgtaaaacgaatgctcagctccgggtaagtcgctgtcacaaggctctcgatgacgcgcggatagccgtgacccatgttgtcaaacaagccctcgcccaccggctgtgcgctgcccatatccgttacggaatcccccgcaaaaataatgcgatccatattttcaaaaatcatggtaaactccccctaaaagagtaaatttctggttatattataatcggatttctacaaaattacaagggcactgtgcaaaatacctaccacgttgacaaagacccgcagctgacgcaaaatgtgaaataagtgctaccgcacttgtgaaatttgatgctacgcatcaagtgaaatgaaataaatctcacgcgccgcagcgcatttcactgcccgtagggcaatttcacataccgaaggaatttatttcacagaaaaaaggactctgcaaaaggcgtggttccgtaagaaaacatttatgtgagagaatcggcgtagtttaggctacgccggttttcttttctttttgggctgcttgggattgctcccttgcttcctcaaaatcaaatgcaccaatgaagttgtagacgatctcaatttctctgaccttaatgcgtggctcgttctcgtccggcgtgtaaacctcggagatataaattttatccacaaactcccggagaatggaagcgtcaagctgctgcatatcggtgtactttctgaccgctgcaatgaactgcctgacgttgactttctgcttctcctgttccttgacttcctgccgcagatgttcgacaagatttgtaaggttggtctgttccagctcatagtcacgggacagtttgatgaaacgctcgtcggagagcttgccggaaatgttatcctcatacagtcgcttgatgataacatccagctcggcaatccgcttttgcgattgcgccagagtatctttcttttgtgccagctccttgtcccgctcccgcaggctttgatctgcggcccgctgcacaaagtcgtcctcatactgcgtcacatactgaatggcttcccgcaggtttcgcagcacgatttcttcaaggacaacgcgccggatagaatgggtcgaacataaagtgcggtctttacggtaagttgagcaaaggtaatattcctgttcaggtttgaagtgattggctctgcacaagtacatctttccgccgcaatccgcacagaacagcaggccggagaacatacccatgtcgcccatcttagtgggacggcggcggccttgtcggattttctggacgatcagaaacacgctttcctcaataataggttcctgtgtgttttcaaagatcacccaatccgccggatcattccacaatactttcttactcttgaacgattgcttagaagttttgaagttgaccgtatggcccaaatagtcaaggcgttccaaaatatgcactaccgtctttgttgcccatttataagggtcagttggccgtttagatgttgtcggcaagtcgttttcgtagcagtaagcaacaggcgaaagaactttattttcttggagccattttgcaatttgcgtcggccccatgccgtccatgcacagtgcaaaaatcttctggacaacggcggcagcttcttcatccacgatccaccgcttcttgttctccgggtctttcttgtacccataaggcgggatagtggtgaggtgttcgccggagcgtcctttggattgccacgttgcccggattttcttgctggtgtccttggcgtacatttcattgaatacgttgcggatggcggtaaactcgctgtccccgcgcacactgtccacaccgtcattgacggcaataaagtggacgccgtactctggaaacagcatttccgtatacattccgacttgcagatagttacgcccgaaccggctcatatccttaacgacaacgcgcttgatcttgcccgccttgatgtcggcaagcatccgctggaatccgggccggttgaagttggttcccgaatatccgtcgtcctcgtcgtagtggcggatggcggtatagccgtgatcccggcaatacttttccaaaatccgcttctgattgctgatactgttgctctcgccgtccagcttatcttcttgggaaagacgctcatagcaggcggtaatgccctcggcttcctcctgcggctggctgtggacatagaattgcagcaccgtgttttgggtagccgtcttggtttcctcgctcaacggcgcgtcgttggatacgcgctgaaaggaagtgactggctgttggtacatttgattgtcaaggttcaaagtagtatcgttattccgtgtcgcacgggggttccgtgcaatcaccatttccggctgtttgctcataagttcctcctattccgcagccggaaaacgaggcatgatacaagtatattataccatatcatgccccatccgtctgcttgtaggaaatgaaaaaatctttaatttttaagtggctgccttgttcaaatcattttggagcagccgacggattttcttgactgcggtttctttcgcgccgtctttgacggtcgctttcacaatatatcgaacgcctccgatctcgtactgacgtacaacgggggcggtctggttctgacttgttactgtactcatacagtaatccccctttcgcttacattggtgtaaaacgaaatgggcagtacggacggctgctggcacagctccacgggaatctcaccccggcccatgctgatgggtgcgccgcgcaatgctttgagggcgttcaacgcgggagtatcattgtcttgcctgtacgtcgtcgcccacaagttgccacacttgttttacagcccggtttgatcgctccgctttttcctactggaaagcctcatggcgcacctgccgcacggctcggcacagacagaatgtgtccgtttgccctatgatgcgccgctatatacgggcatatttttcaaagaactgtgacgccacagaccttttgctggcggggaaagggtaagccgctgcatccagccgggcgattatcgttaaactttaacgatagcttggatcaacctgatttctaagcaccgtttcatgtactcgtccacgcataaatggggatagccgtcctcgtcatagagcgtccgggtacacagacaattcatgtaattgtcatagtaccgaagcaaccgttctacggcttggggatcacctgcacgggcggacacatacactgaaaggggcaaaggctctttgcctttgtaggcaggttctttcatccgcgtcaacctccttccggcatgagcgccatcaattttacacgcaactctttcagtgtctttgtcctgtggcgctggacggcgctgcgggacatccctgtgaggctggcgatctcgccgtctgccatatccagtacgcagtacaggatcaaaatgctttgttcctgttgcggcaggttggcaaaagcgtcggccacaagctcgttgtcgatatgtaaatcgtacccatgagagctaaatacaaagctgtcgctggggtagcggtctacggtgcagagcttgtccaactcatgctgcggcaggtcgctgaacgtcgtttcacgatctctttgacgcttcatattccgcagataagcccgtgcctcattcttcaacacttttttgcaaaaggcatcgaactggccttgtccatagtcgcgggggatagcttccatcattttcaccccctttctgttgggggattgggtggttctctccctttccgctactactaatcctgcgataccctttgctgcccgctgcacgcctcctttttggacttttttttgaaaaacttccagagcaaatttgaaaccgcagaaatgacaaaattcgcccgacaggttgtagacccaccgagcgaaaatgaaagcaatatgaagtttatttacattgtatagttcatactgttggccggagctgccccctgttgggtataggctttttttaacaagctatgcctttgaaaaacaggacatatcagcatggcggctccctccgtgggccgccgatcctgtgccgggcaaagagaagcggcggccttgattactcaaagccgccgttggtcgtatgggcgcgtcaaaagggctactgggcgacggctttttttctttgccgtcgtccggcagctatttcaacatattatgtccgaaagaagtcgttacgctttaatgtttcctttcttccttataagaactgtccccgtcatagtagctgcaagactggctactatatgactaaccagtaccgcaacccaaatcccgtttaggccaaatcccaaataagatagcaaataggccaaaggcatccgaaccacgatataatagaaaatcatcaagaacatacttattgacggttttcccatgccgttaagcgcacccaaataacagtttgtgactgtgttgagaacatacccgatgctgacaatcaggaaatatgtaccgacaatgaccgcgacatcgctgctcctgacgaacaggccggaaagctgtttggaaaatccaaccaccagaacagagaggatcacaagcaggccacacccatatcccaaagcgcatttcaaatagtcttttgctcgatcatatcgcgctccaccagcgcattggccgatgattgtagttaaaaccatgttcagagccatagccggatagaacaggatagtttccagttttcccgttaccccataagccgctattgccgttacactatatgtactaacgagtgccgtaagggaagttgtgctgattgctggaatactttgctgaattacagagggaattgctttttgaatcagcagcaggacatcactgcaattaaaagcagagattttgaatgtaaataactttttctttttcagataggtcagcataaacagcaggcaaatcatctgtgaaagcaatgtcgcaatcgcggcaccatgaaacccgatgaaatgaataaaaacaggatcaaagacggcgttcaaaatggttgataccagcattgcaacagcctgaaacatggaattaccaaagctacgcaaaaccgcagtgaaatacaagtagaggtaaactgccagatagccaaggatataaattgccaaatagctgtatgccatatcataagtttcggcaggagtgttcaaggctttcaaaattcccggaagaaaaatttcaagcaaaatggtgacaagtagggaaaatgtcactgctacgcagaacgatgtggctatcaaactttcggcctttttcttatcctttgcaccaatggcttgggagatcaaaatagacacaccgtttgttgctcccattgcaacagaagtcaaaattaaaatgataggggtagaatttgttaaagcggcataggccgtttcaccgagcagatttccgatccacagactgtctacaaggttatacatcatattaaggaacatggcggcaatcatcggcagcgccattgccataaggcaacgctttgtgttaccacctataaaatcaattttcgttggcataaatagtctatcctttccatagataatgaatgaacaacattcatattgaagcccaaaataagcaccgctgtttgcggcacgcttagttgaatgaaagctattcatttcctgctttttgaaaatcccccgtcccaaaacgggggatcatctcaaaggtgaagtgcaaatatgagaaattcacgaatccgtttggatttatcttcttgtgtaagatcgtctgccagtagaataccaagctgcccatatacgcaaaatgtcgcggcggcctgcaaatcatcgaaatggatttcacctttttgtttggcacgttgcagcagtttttctacaagtggcaccaacttctcacataccttgagggcaagctgatcgtgaaattttctgttctccattccgtgaaaaacagaataatattttgtgtcctgtttttccatagtggcaggcatttcttcaataatctgacgtaaggttttgcggtcgtctgtttcggcatatgcaaattgctctaccagcacatcggcatattgttcaatcgcgctgtcaaataaagcctctttggacggaaaatagcgatagcacaaaccttgtgccacaccgatggcttttgctatatctgtaattgaggttttttcataaccgttttccccaaacaatttgagggcagtgtctaaaatttcctgcttgcgtacttccggctcttttgtaattcgcatagttttgagcctccttttttttatcatatcacccccacacgaaaaaatcaatgagtgaatatcaatcattttttgcccatagcaatacacgcagtatttccaatctgctcccacgatacattgcgaaaatattttgaaagcatagaaacaatttctgcttcggagtaaatcttgacatccccctctttgctgtggcgcatatagaaattcataatgatgcgtcctacaagtggctgccaacaatcgcccattaggaacgtgccgccgggtttcaatacccggtgtacttctcttaggacattcatcggagctggataatgatgaaacgaatcattgcaatacacgacatcaaaggtattgtccgggaaagggagtgcctcactatctcccaacaacagtttcacttgctccggtagcttcgactttgcaacatgaagcattttttctgataagtcaattccgtataattctttgccaacatcttcttgcaaaataagtttcaacatctcgccagttccgcatcctaaatcaagggcagattggaatggaatatgcgacagcttttccaacaggacaggataaagggatcgggcgtgctggcccttaatatctttgtcataggtagcagcttgttggttaaaggctgcctttgagttttcttttgcagtattcatggcattgacctcctttccatctatcagtatagcaccattttctgaaatgtcaatgaatgttattcattcaattatatgaattataaagtttaatctacctgcatatagcaacattccatcgggatactatgaactatacaatgtagatgggtgatgttatatggcgaaagttgaagattgccccggctttgaaactttcggcgcagatgtgaaagctgcgcggaaagcaaagcacctgacgcgcaaggtgctggccgaaatagtgggaattgaatggcgctatcttgccaatattgaaaataaaggcacgatccccagcctcccggttgtgatccagcttatcaaagtctgcgggcttcccgtggagcagtatttcaacccggaaatcatacgcggggacagcgaacagcggcagcgggtcagccacaagctgaaactttgcccggaacactatttgccagtcattgagggcgcaatcgacggggcgctgaaaattgaacaatcagcgaaagaaacgggggatgtgtgaaagcatcctccgttttccgttttgccagagggccgcaaggctctcttatttttttgcccttttttcagagaaatcccgtattttgcgggtagttggacgtgttgggagcgttttagtagcggagaaaaagaaacgtagcaagcataggaagtgtagccacacttccgaaaaccggcccgcccctgtccctgcgggccgtggccggttgcttgttggggaaagccccaaacccctgttcagaaaggacggtgaatgaatggcaaaccgaacacgaaacattgtgctgcgcgtccctgtgacgtcggaagaacgggccttgatccagcagaaaatggcccagctccacacgaagaacttttccgcctatgcccggaaaatgctcatcgacgggtatatcgtccacatggacaccagcgacatccgggcgcagaccgccgagctgcaaaagatcggcgtcaatgtcaatcagattgcccggcgtatcaacagtaccgggactgtgtacgcgcaggacattgaggacatcaaaggggcgctggcgaagatatggcagttacaaagatacatcctatcaagtcaacgctgaaaaaggcgctggactacatcgagaacccggacaagaccgaggacaaaatgctggtgtcctctttcggctgctcctatgaaacagcggatatagaatttgaaatgctgctggcgcaggccatccagaaaggcaataatctggcccaccatctgatccaatcctttgcccccggcgaggccacagcggaacaggctcatgagatcgggaggcagcttgccgatgaagtgctgcaaggaaaatacccctatgtgctgactactcatattgataagggccatgtccataatcacctgattttctgcgctgtggatatggtgaaccaccgcaagtacaattccaaccggcagagctacgcctatatccggcgcaccagtgaccggctgtgccgggaacacggtttgtcggtggtacagcccagccgggataaaggcaagagctatgcggaatgggatgccgggcgcaagggtaagagctggaaagccaaactgaaagctgccatcgacgccgtaatcccgcaggccaaagactttgacgattttctccggctcatggcggcgcagggctatgagatcaagcagggcaaatttatctcgttccgcgcccccggacaggaacgcttcacccgctgcaagacgctgggtgagaactataccgaggaagccatcaccagccggatcaaggggctggccgtggacagaggcccgaaccggcagcgcaagggtatcaccctgcggatcgacttggagaacaacatcaaggcccagcagagtgcgggctatgcacgttgggcgaaacttcaaaatttgaagcaggccgcaaagacaatgaacttccttaccgagcatggcatagagcaatatgccgagctggaaagcaaggttatggagatcagcgcggtcaacgacgaggcggctgcggccctcaaagacgtggaacggcgtcttggggacatggcggtgctgataaagaacctcaccacctacaagcagttccggcccgtggtgctggaataccgcaaggctaaagacaaggctgcgttccggcgagaacatgaaagccagctcattttgtacgaagctgcggcaaaggccatcaaggacgccgggatcacaaggctgcccgatctggctgccctgaaagccgagtaccgggagctggacaagcagaaagcgcggctgtacgaacagtacggcgaagtcaagcgagagctgaaagaatacggcattatcaagcagaatgtggacagcattttgcgggtgacgccgggaaaggagcaggcacaagagctatgagcataccgagaatgaattaccctcaataccgcaaggcccggaagctgacgcatgagtgctgcaactactgtgacgggaactgccttttgctggacgacggcgaggaatgtgtgtgtgtccagagcatttcctattcgctgctgtgccggtggtttcgtgccgctgttctccctctggatggggcgctgtatgccgagatcatccagagccgggacagcgtgaagcggtgcgccgtatgcggtgctgcatttacaccgaaatccaaccgggccaaatactgcccggattgcgcggtgcggatgcgccggaagcaagaggccgaaaggcagcggaaaagatacctgcaagctacgcagttaagccgctgaataggccgccatagcgggcttctggcaagcgattgacggggcggcaataggattgctccaatacccgccggaacgggttttgaaatgcgtagaatatcccccataggaaaacgccgggcgcagggccaacaggccgccgcgtccggcgctttcttatgggctgttcaggatggcccggatcagtctgctttgcaatcggcgcttcatgtactcgtccacccgcacatggggcgtaccgtccagatcgtagagcgtccgggtacagagcttgtttatgtagccctcatagtaccgcaagacgcgctccacggccagtggatcaccagcgcgggccgcctcgatcacagacagggacaacaactcccgcccacagaaagtcggttgcttcatttcggtttcctcctttcttcctccaatcgtttccgcaattcgttcagggccttggtgcggtgccgctggacggcgctgcgggacattcccacaagactgccgatctctccgtctgccagccccaacacacaatgcaggatcaaaatgccttgctcctgttccggcagactggcaaaggcagcggccaccagctcgtcatggatatgtaaggcatagccataggctgtgaataggatgctgtcgcttgggtattcgtccactgtgcagagcttgtccatttcttgctgcgataaggcgctgaactcgatttctcggttccgctggcgtcccaaatcccgcaggtgggttctggcctcattgcggagaacagttttacagaaagcgtcaaaccggcagcgttctccataaccatcaggagtgtacttcatcttctcacccccgatctgcgggagagtgagaagccggggccggttgcgtcgccccctgtgtctatgttgctgcggaagctccggcccgcaccgaaaaaccgcaggaatcgacaaaattcgcccggcaggtcgtagacccaccgggcgaatacgaaagcgttatgaagttgccttacatggtatagttcatactgttggccggagctgccccctgttgggtacaggctttttttaagaagttacgcttttgaaaaacaggatatatcagcatggcggctccctccgtgggccgccgatcctgcgccgggcaaagagaagcggcggccttgatttctcaaagccgccgctggttttatgggcgtgtcaaaagggctgctgtacgacggcttttttctttttgccgtcgcgcggcagatataataattatttggaaattgaccgcttaaagagtatccatgtactgatgaaataacagattagtaatagcactaatattcctacaatcatccctatctgcaacattaaagctctcgatccgatatatgctgaaatctctgctgaaacagtttgaataaagtaagcaatcacaatcatggaaacgatgattgctacgagtatgggaagtccaaaccatacacctaattgttttagcacaagtttcccgatctgctgttcttcaactcccagctttcgcagtaccgagaagcgatatttatacttaccagcatctaagagttgctgcaaggacaatatcgtaaggcaaattaccatcagcacaacagctccgtaaagcatggaagcctgcataacaaaattatttgcttttgtactattgatctgcaaggtgcttaaacggatcgtatatctgacgccagtatccgtaatctctggatactcgtcggagaaaacctgttccaattcacgggcattttcataggaaatgttttcagacgtagtgatatagcggtttcgcataaccgggagcagcttttcgcaaacactgtccgggaatatatagagtacgtctgtgtaggaattgtacgccgtttctccgattgcttcctcataataggactgctcagaaagggttaattctcccgcatctgtcatgacgctggtatgctctgccaagaagctgttccgttcttcctcggtggcgatagtctgccattgtgttgtgaactcgttttccgataaagaaaccggcccatatcccaacattgcccggattgtgttgtagtcactcaatgaaattgctgcaataggaaaatcatatttcatccgattgtgaaaatcatctttctttggaagatatagactgaacgtacagtcatagtctgtttcaatgccatgctctgcaagatagtctgttacaacctcataatcatctccgggaagatattcttcgtcatatacatcattgtatctggaagaaatctgcacatcatacattgaccgtatatccagataaccagaggcccaaccagtcaaaatcggggcagcgataaacaggcaaatagcaagtacaagcgttacgctgattagcgtcatggccttgctagtggtatttagctttgatataacttgcccgaaaaagaacaggttttcgcctttgtatctatgctctggtgatttttctttccatacaacaatgaaattgctggcaaggtaaatcagggcgcagatgaaaaaaatcaagtcaaccagaacaaacaataagtattgattgacggtgcctgcccccaacggaagataatactgattgattaaggctggtacactggctgctatgcaggcattcagagcagagcagatgaacagcccgaaaataaattttggaaaaccgtatttttcctttctgattagccacaatacaggccaaagcaaggccgctacgggcaggacgatattaccccaaaacatgacttgaaccggcagggcaaaacggctgtcataataaaaccagaccttttgaacaccggttacagccatccagattgtgaacagttcaaacagtacagcaacaatgacaatccaacggccctttttcagttccgggtcattttctcgatctgccgcaagcatatctacaatttttgttttccgaatggtgcgggtgttaaacagccctaccacaagataactcaatacaaagaagcacaccgtcagcacgacggtatccgggaacagcgtccatgacagttcatatttttttccataggaagtcagcagcattgccgtaataaattgggaacacaacacaccgagaagaatgccaatagcaatcgaaatcattcccattacaaaggtttctgcaaagaacagtctgccaatggttttctgttccatacccataatggattgtacggcaaattctttttgtttacgccgcagcatatagttattgacaaaccgtatcaggaaaagcagaaagagggtaatcgcacaaatagccactttcataccgtcgcctaataccgtaaaattgtattcgcttccaatatccggctgatagtagttgctggaaatggacaggaacgaataaaagagcatgacgcagatcgtcatggttacaatataaaccagatagtctttgacagaccgctttgcgtttctcaaaacaagtttagcatacatggctctgtcctcccccaattatggttaggacattcagaatcttatcaaaaaaagcacttcggctgtcactgcccttatgcaattctgtgaaaatcttgccgtcctgtaaaaagagaatacgacttgcgtaactggctgtaaaagcgtcatgtgttaccatgaggatagttgctcccatctgctcgttgatactctggattgtagacaaaagcatctgcgccgaatgactatccaatgcgccggtgggttcatcggctaaaatcagtttaggattgttaataatggctctggcacaggcacagcgttgcttctgaccgccggacacttgatagggatacttgtctaaaatatcacggatgttcagtttcccggcgatctcactcacgcaaggctccacttctttcgccggggtcttgttgattgcaagcgccagcgcaatgttttcagagattgtcagagtgtccagcagattgaagtcctgaaacacaaaacctaaattctcccgccggaaccgggcaagagatttcggcttgatctctgtaatgtctgtcccctccaaataaatgtgacccgcgcttactgtatcaatggtggagatacagttaagaagagttgttttcccggagccggacgctcccataatccccagaaattcgcctgcttctacggaaaagctaatatcttgaatggcctttgtgatgtttccctcattgccataatatttctggatatgatctaatttcaaaataggttccatgtgtcctcctgcctttctaaatttctcatacccttattgtaatctgtatttccacccctttgtatcaagttttcttacgcagttcttacaaaaatgtaagaagtgcagagcatatcagccctgcaccccggtaacaaaatcattgatatggaaagaaagagaaataatagttccttttccttcggaacgggcagcaatccctattcccagcttatcacaaaggcgcttgcagaggtataggccaatgccggtagaactgtgaatcgtccgtccgttctgcccagtaaaacctttctcaaaaatacggggcaaatcactttggggtatgcctataccgttatcctcaacagaaagaacaaccctttcattttcttttactgcaaaaagatgcagaattggatggcctgtacgatattttatcacgttgctgatgatctgatccaaaataaactgtacccatttatcatcggaatagatactgtactccatatcgtctacggtaattgccacattgttttgccgcagaagatatttgctatctgcgattgctccgtgtaccacatcactaagcctgatttcacggacggaataatccttttccgtatgctcactgcgggcgtaatacaaagcctgttccgtgaaacgattgatattttccaactcggccattagctctctcgtaaatgaacagcggttattctcgcagatcagtttcatggctgtgataggcgtttttacttcatgtatccattgttcgatgtattctttgtattctttccgttctctttgaacctcgcctatttgttccagcatggatttttcagccattttcatgatctgataaaatacctgctcatcagctctttccggctcctgcatgatttccggcagcagataccgttcttctaattgttctgccatattcaacaatctatccagagcttttttccgggtgaaaaagaaaaacaacaggcaggaagcaaggacaagtagccagaccacaagaatgaataggacggtttgaatattatttccgcttgcaatcagaaacagagcaagggcaagcatacccagcagattgattaaaatgacggccagttggtttttcaaatattgtttgccactcataacgtgtacccctgtctgtgcttggttttaataaattcggtcaaacctatggatgccaatttttcgcggatacgggtcatattaacacttagggcattatcatcaatgtaaagctgattgtcccaaagaaaatccacaatatcgctacggggacatatctttcctgcgttcttaaaaagatagtagagtatttttaattcatttttcgttaaatcggctttctttccgttgtattctaagatgctgctttctaaatgtagggctgcaccattccatgtaagtatctcggactgcccggaagcatacgcccgccgcagcaaggaagcaattttggcaagcaatatagctgtattatacggctttgtaataaatgcgtccccacccagcatgatgctgttcaattcatccatgtctgtgttactgctcgtcacaaatacaatgggaatatcggaaaagctgcgaatctgcgaacatatttcaaaaccactgtttcccggcaattttatatctaacagaaccaaatgaggggcaaacgcttttacctgctcgatcacgtttgaaaaatcggtagctgtgtcaacctcatatccattaccggacaaaaggtttttcaactgtttttgtattgttaaatcatcttccacaactaatattttcattcttccgttcctttcgggcctctgtatcgtctgtcctttggcttctctgcctccttggggatcagccagacaccggccattttgacagcaccggggatgcgtccatcggtgcagtaataatttatctgtcgggacgaaacgccccatttttcgcttgcctctttgagcgtcatgtaatccatgttcacacctccgacaatctatttcattatatttcatttgctcgaagaatacaaggaacagaatatgaattatagagtgtagcagcttcacaaacgatatgcaaaatacgagagctgaaaagcccctcttatctacgcatttaggggtcaaaaagcccacggaaatcaagacttttcggtgctggtcggtgtggtggcagaatgatttatcacatacccgtcgaaacgggctttgaaatgcgtaggaaaatctttccgccgctggttttcctgccgcttctgtggtatgctggaataagacaaaaaacgacaggagttgacacgatggccgaacaggaaatgttgctggacactgataccatcaaggccgccgtcgccggtgagaagtgggccaaagataaagtgatcgaacactacacccccatgatcgacgagctggccgttgacgaagatatgaagcagcaccttattttgaagctgctggaagaactgccacacttcccgatggggcaggcataagaaaaaagagcgccggacgcagaggcacacagcccccgcgcccggcactctttatttaggtctgtccatagaaataaaacagacaacagagttataatgtgattacttaaaaacaaaaatttcttcaataggtgtgtttacagcccttgaaatatcaatcgctaattttagcgacgggttatattgtgccttttccagacgcatgattgtttcgcggcgcactccaactatttctgccaactgttcttgtgtcaatccctttatctgcctatactgctttaatttacattcaaaatctggcatagttagtcctcaccttcatcaatcggatcgtcgtggtcatagtgataaagcaagaactcgctaaggaatacttcaagcgcgatagcaagagaaaccataattatatacgcaataaaggtatattccaaattccccataagtttgccctgtcccaaaatcagtgttacaagaaaaataattgtaagagctgttttattggctacggaatgagcgtgcattttgttttcttggtatcgctcgtccataaaagtatttgacgattttccttcatagaagaaaccaaagaaaccaaaaaacacaaaaaaaacaaaggggaaaatagttttgtcgatgttgtatgtccagaaccccaaaaagccgaaaaaccccaaaaagcctaagaagcccaacttaggattaagatttcgggttatagttgcattgttgcctttccttttattgacggctataacctgtatcagcagaacgacaaggtacagcacataaaaggtaattaagatgcccgaaataatcataggcaggtctttaagacggaaagtataggtcgaaatatccattgggacaataaatctggcttcattaaaagtaatcgtataccatgaagaaacagcgacaagcaaaatacatattgctcctaaaataacaagcagttttgttttattttttttcatttttacagcctccaaaatgtgatgtatttgtcacctaacgagataaatatatcacttcggattgcttttgtcaatgggcaagatacaaatatatctcttttggtaaagagcgccggacgcagaggcatacagcccccgtgcccggcgctttgcgatgcttagatcactcttacactttatatttcatattgtattgctctaaaaccacattgatgatatactaagaaaagaatatcaagtgtgtatctacaagttaaaagaaagggaaaaatatactatgctcaaatcaattataacattgatagttacccttattgtaggagttgtattcatggcaataggaaatgatttccttaatggatctactgatctcggtgtgattgtagccgttgccgtagcgggggccttggttgtgttttttaatggacagaaaggaaaatgaaaggtacgattacaaaataggatttttgatgtggagagctgattatggagaatatatttgataagttcaagaaattaaatttagacacctcgcccataggtctatcaatcgaattgagagaaccatttttttgtacgccgattggagcccaaattattgggtgggataatggaatacattattgctttatcaagggatttaaggagattgttttttgcgtaaatccagaaacgtgctgtaattattatgtttatccacttgctaaagattttacagattttttaaggttgcttctttctctgaaaacaacaaatgcaattcaacaagtagtgtggatggataaagatgcttttgaaaactttatgaatgatcctgatgaagttagatatacaagtagtgagccagtgcaaagcatacttcaaaatatttcctctaatttagaggttgaaccgatagaaaatccatttgattatatcaaaaaactccaaaaggattttccgtataaagagataaagtttacagatgaattttataatataactggtttaacacggcaagagaatatctaaaaaagttgcagaggacactttcaacagtgttcttctgcaacttttttgttgactaattaaacttttgatttttgtgagatttctttgaaaaggatgccgttaataaccagcccaccaacttgttacctgtgtatgtgttgcttttggaagatgaatcagattgctatacgcattacttccgccgtatgcaagcgggcgaatatggtgaacatcgtataaactgcgatttaaggtaacgcccgtattggcggtgtaagtattatagtaggtatcagctaaattagacggacgagtagttgttgcacctttggcatagttagcaggcggcatgggtaggcttttcccgcttacagaatcagaaaaattaaaattccaagcgtgtcctgttctattagaaagtgcagttgttgttacgccacttccagaagtagcattatcatagtccgtaatagtgtaggcaacataataataccctgtttttgcaggaactgtccatgtgtaatctacgccatactcactgttggatgtatatgtatggtaaacagaacccccaacatttgagtaagagccggataatgttgtaaaactcccctttaattgagctgtcaatttaatatttggtttcacaaaaggagaggttgggcaatcaacattaaaataccaagtaaattcgccaccactggtttttttaattccagcacggacaagataaatttcaattcctcgctcactgggagtatcagcagatcctttaggaacagggatggcaacttcgtcgaaagtaagaagttcaccatcctcaacaagcatttcacccgtggtcgtatcgtaatgagtgacttgcccggaatcagcgagagaggtatccatgacggcttccaactcattctggtagggttcagccgcaatagcagtaatcgacattcctatggccatcatggtgacaagcaccaaactcacaattttctttaagtgttttttcaacatacagtcattcctccttattaggtatcgtaaatagaaaatgccatcaaactatcatcccaatggaatcacctctttcattcatttcaatcgcgcaatccccttatgttttatggtaaaatcatacaaattatgaagtataaagtcaatattatatgaacaatacagtgtaatatactaaaaagcgccggacgcagaggccatacagccaccgcgcccggcgctttgctatacttggatcactcgtccgtgaaatggaactgccgcgcctcaaagtcggcgtcgtgcatggcgtccagcttatcggcggtctggcgggccagcgccgccatgtcctcgtccatgtccggcagggcggcccggatgttggccgccgtcctgcgccggtcggtcttgtgatacatacagatcaggttttcttcttccacggtaaactgtaccattgtcatacctccaattcgtttttcttggttctggccggggcctttttcgaggcttgggcctgtttggtttcggatagctgcctgcggatggaagcgcggggccgccgcacttccttgtcccggttctcgtccttgccaatcactgcatacaggccgtgccggtctttcatgccggtaaagcacagggatttatagggcagcatggaaaacagccggtcggtgtccttgctggatgcaatctgcacgaagtatggggacagctccaccatgaaatgcgtcttgttggggctgttgggggcggacagatctttcagtccgaccacgatccgctgcgcctcggccaaaatcatgctgtcatgcagcgccgtgacgtgggccttaaagtcgccgggcgcaagctgcgcccggcctttctgttcatgccgcaacagctcccgcaggtgttccggctcattgggcttggcctcataccgcaggaacgcccccagattgggatcgggccgtccgtcgaagtacagaccggcgggctgctcccggtcgcccttttcatagtgcaggatgatgttgtcggcctgtaccgcctcggctgcgacgtgccggaagtgctggggatagtccagctcatagagattgccgcgaatgacaccccgcaccttgccggtcagctccacggcgtaggccagcacccggtcacgggtctgctccccgtaaaacttccatgtgttgtgttgcgcggtgccttgcaggtacacatcactttcccggaaacagtacgtcccggacgggcgggacatccacaaaagcgtcttgtcctcggccttatcgctggcagcggcccacccgatgatctccttgtcgatctcaaaatcgttgcgataaaaggcggtgttctgccgcatgagctgatccagcgcggccagaacatccacattctcaaacctgttcatggtgtcacacctccaattcctgtgctttttcccgctgcggcggtttcttctgctgttcctccttggcggctttgagctgcgcccggatggacggttttttctgtttctgcgccgggcgctggggctgcttgggcttttgggcctccgccttggctgcctcggccacgtcgaacaaggaaatctgttccccggctttggccttggcttccagttcactcatggtcggggcattgttcagaacaccgtcgatcatgttgtagttctgctcggtcgtcatttcagcggccttgatggggctttcctgctgggcggggatggcaaaagcgtctgtgccgttgcccatgataagatacttgccgtcctcggattggtggtggaaaccatagcctgcggcctccaactgctcccggctcatgtcggttacaaggaagctacctcttggggtctggatgctctcgccggtgagcaattcccgtggcgtaagctgtttttcccgctgcaagaaaaactccggcaccggcgtaaagccgaagctgtcacagtaatgggcttcctccttgccgctacggttcagcaccacaacgtcggaaacggaaaggctgtggccggtgaagtcggcgggacggtcaaggttgaatgtacggtagatgtcctccagcgtggttttgccgtccagcggggccgtgtagataagatcgtaattctgccggtcaacggccagccccgcttcctgcaagctctcgtaagcctcaaagcgatagtcccgtgtttccggcccgcctttgagctggtagatggtaaaggtgtcgccctgttccgggggatcgacggtgaaatgcgggttttcccattgggtgaaaggcatatccggcatggccttgtagctgccgttctccatcgcatagggccgcacccggtcaaagccgatttcctgtgccacacgggagaggctttccagtaccacgggatcactccgcagccgttccatgcgggtgaagtcctccacaagataattctggcccgcccgcacatggagaatatcggcggcgctcatgccgtccttgctttccatgcccagtgtcagatgggcgtagggtcggccatcggtgttcaaatccttggcctcgctgttatagggctggctccgcagctcgtcgaaccgggccttggcttcctcaaaggtggcgaagtgttcaatcggggtctgttgttcggcattggtggcccatgttttcagatcggggatgatgtaaaagccccattcccggcctgcctccggcgctgcggcgctacgctcggccagtgttttttcggcacgttcccgcacatcgtcccgcagcggcaccgtatagaggctggaatcagaagaaaagcccacgttattgaaaacgtagtccacatcggcctctttcaaggcacctgccggatagtagtcagcccgtgttggggtgtcgcttaccttgccgttcgcaatatcatggttcaatcccgtttccagatgggtatagattttgccgtccacggccagcgtcacatagtaccagccaatataaccgccggtcttttcgtcggctccctcgttgaactccacattgagcagcgtgtagggcttcaagcccttttgggccgcgatctcgttgtccttggcctcccgctgcaacagcgcgggcagggccgcttccttggtggccttgacgatctccgggttgtactgtaccaaagtgcggttgacacattccgtctgcaccttgaccgtcttggcttttggcgtcaggtggttgccgataaacagggacgcgccgttgtcaaaacggatcgtcatatcgctggtgccgcgccatttgccggtacagggggacgtgtgaatttcgccggtcttgcagccaaacgcctgcgcgatcacatcaatcttggcctgcaagggcaggtctttgtagcggtcagcgatttccagcgcctttttctgcaactccgtcagggtttcggcgggagccgcctgcggctcggtgtcggaagtaacttcctgcgccggggcggtttccggctccggctcctgcacgggttcttgttccggctccggctcttgtcccggttcctgttccggggtgggttcttgtgtcggctgctcctgttccttggcatacaactccttgacggcctcctgcgtcagctccccggtgttgagctgatccatcagctcccggcaccgttccggcgtcccgacgtagagaatatccccgatcttggccctgccgttatcctgcgggatataggcttgcagcatatacaggttttcccggctgtcgctgcgggggttggcgtgtacccggtagaagtagtccggctcggcctgttcctgtgccatctgcgcccgctgctcccggctgctgttgcgttgcagctccgtgggcttgatgccggaaaggggctgaatacaagcgatcctgtccgacgcatggtaggcgttgtcgttcaaaagccgctgccatgcgcccacactcggcgcccagcggaaaccgtgttctttcaactgctggcgggcgtccgcttccggcttgccgtcaaagaacacctgcaagcggccctgatcccggttggcctccacatggccgccgtcaaactcccagcccacataggccacttcgtttgcgcgggtcaggctttcgatccgctgccggacacggcggatttccgcattgttgttggacagctcccagctctgaaacggcttcttttcatagtgccagccggacgccatatctgctttcaggttttcaaggttttcaggagagaggtgcgggcagccgtccagcgtaccgtgtttgcggtaataggcattgaccgctttcatggtttcctgcgccttttccagaccggccagcttcttttgcagcttgggaatggcctgcgggtcgtcctgccggatgccgcccatgccggtgctgcggattttatcaagcagcccttggatgtactgccattcctgcatattgctgtcgcgggccgcgttctgtttctctttcttgcgtacctggaaattggaaccaccggcaatcaaaatggacggaacacgggcgtcaatctcatagccgtggttcatattggcagccagcttccgggcataggtgtcaagcaagctgtcgatcttctcatggtacatgggatcgacgcgctttttctgttcctgtgccagcgcaaaggcttcatccacataatgccggtactcggctgtggcgctgccgggctggtagtcggaaaagctgttcatttccttggctcggcgggccgcgccctcattgatggaatagtagtagtcggacgccgcaggctctttctccggttgctccggggtttcctgctggggcggctcttgggcctcctgcggctgggccggggcctcatagccagccgccgcatattcctccacggtcataccggcgtcggcggcctcctgtgcaatttcggcctccacctgcgccttgtagtcctgcaagctctggtcgaagtcggtcagtttcggcatttccggcaaaggctctccgtggttgagcagcggacggcactccatagcgtagtccaccagcgccccatagtaggcggtttcctccggcgtcagggtgtcgctggacgccaaacgggtctgcgcctcctgttccagccgggacaggttgcaatgcagctccatgtaggaaatgatctcggtgagaaaggcttcacggctggcgtgatcctccgcccacgcctccgggccgccctgccgggtcaaatggtctttccatttttcatcgttcagataaaaggtctgatactcccggatatgctcaatcagggaaccgtcccggtcgccaaaatcctgccgcccggaataactgtgcggctctccttggaatgtaaaatcaatacggaagtcggtcttgtcatagtagccgccgcctcgatgttctgcgtccagccgggcaaacagggtgtcggcctcatgcagcggcatttgctggcccatttccagatcggggctttcagtgaaaaggatcgtcacaactggctctgccgtggggtcaagggcgggctgctgtgcggccttggcctccgcaatttctcggtcaatccggcttttcaccagctcgtccatatggccgtgctgcatttcaaagccatgttcgcaaatctcattgataagggcaatcaccttgtccgtgttgtccacggcctcggcgtactccacgatcaaccggcgttcctcgttgcccatgcgctgtccgtcacgctcggcccagtcgatcagggcgttggcccgttccgtgggggtggcctccggcataatgggcttgttgttcaaaaggccgtcaatcccattccacggctgcggctccggctgggcctcggcccgttgcagcgtcccgtcgccggaaaggacaaagccctgtgtctgaatggcgtccaacgtgccttgcgtcacctcgccggtggatttcacatcggcgtcaatcagggtttgcagcatggcctttacactgtcggtcatttcctgctgctgttccgggggcagcttggaaaacacactgtcgggggcaggctgctcggcggcctgttccacagtcggctccacaatttgctccacggcctgctgcgcctgccgctgttgctgaagctcggcaaggtggccgtcgatggtggtaatcagctcatgggcggtggcccggatggtttcaagggacgcccgcagctctttcaggtctttgccggaactccaaccggccacatacccaaaggaatagtcggacgtgtccagtccgtagtgctggcagacggcataggccacgctctcggcctgcacctcgcgggtgcggctgtcgggccggtcggcctgctcggtcacaggggcctccgggtcaatggcgtggagcttggcatgggcaatctcatggatggctgttttcaaagtttgtagctcactcatgttctcctgtatggcgatccgcttttccgtcaggtggtagtagccgtgagaaccaccggggatgtcctcaaaggccatcggcacgggggaaatctgttccagtgccttgaagaagtcctcgtattgctccacatttccggccagctcgtccacaccgatagagggcaacggttcgccctcggtctggctcacgtcaaagacagacacgatcttgaacgccggaacttgtgtttcctgtacttcggtcagaggcttgccgtctttgtccatgaccggcttgccctgttcgtccagcttcggcacttcctttttcaccttatagggggcgggggccaaaatcttgatgcctttctcgccccgtttcacattgcggtgaaaatcgtcccgccacttgttgtagcccgccacaagctggccgccctgcatggcgatcagcagcgtattgttgaagctgtaactgtggaacttcgccatagaggtgagataggctttgtagcgttcactctcgaaaagttcctgtatgccggtttccagccggtcggtgatttctttcatgcggtcggcgctgttctggctgttgagaataatggggacgacgggcggcggggccgcagcttcggcggtgggcgctgcctccggctgcaccgtccgggccggggcctcgtcccgcagaatttccggcgcgggataagccatcacccggtattcctccggcaccggctggccctcatggacacgctgccactcgtcgccgcttttcaccagatagccgtaatcagtgaaaacaccatgctccgtattggcaatatgcaggccgaaacggggcaggaaaattcccgctttccattcctccggcatatccaccatgccggaacggttcaggtagtagtcacccaactggcccgtgccggtgacatccggcagatgcacatagtagtccacgttgtcgggatagtcgatgatctggccgatactgtgaaaatcgctctgcgggcttgtcagggcggcgttcagctccgcaagctcggcggcgtccagtttttccagcctcgcggcaaggaagttcagctcgtccacatcggcagacagcaccaaatcgcggggcagcttaacgggacgctcctgcgggcttcggtagtcgtacaagaaaaagtcctgcggattgtcggcactgatcccgatttcccgcagggcttcttgcagcttttcggttgtggtcggcaaagaaaaccaaaggccctctttgccttgctcataacgctgtcggttatgaagcaggatagaaaacacttcgctcatgggttcactcctttcatattcataggggtttggggctttccccaacaagcaaaatccccggcccggcagggtggccgggtcagggatttatcggaagtgtggctacacttcctatgcttgctacgttactccgtcagctccttttctccacgcggtagatgacgtatttcccgccggtatcggccaaaagcaccgtcccgtcgtaggttttgccggttttcatggagcgcaggccctttacctttgcctttccgtctttgagcagcgcggcggcgatcttcggggtgaatgtcttgccccgttcctcaaaaaatcggtcattcttccacatgacaaactggcaggcccggtttccgcagtaatagtttttcttgccctcgtagacggcttcgccgcagcggggacacttgccgataaccacacgctcggactgaaacaacttctgcgcgtcctcgctgatctgcgaatatcgggaaatcaggcttcgggtcatttcctcaatgcctaccatgaagccatccgggtcggcctcgcccttggcaatggccgtcagcttggtttcccattccgccgtgagctggggagaagtcagcacttccggcagtacgcacacaaggttgtggccgtccttggtgggaagtagctgtttgcctttgcgctccacaaagcccatctgcaccagcttttccagaatggaagcacgggttgccggggttcccaaaccttggcgctcggcgtcctccggcatatcctcggccccggcacgttccatagcagacagcagcgtatcttcggtatagggcttgggcggcgtagtgaaatgctcggtgatgctggccttcaccgggtcaaaggtctggccctcggtgatctccggcagctcccttgccagctccggcgcgtcctcgtcggcgtcggtcttgaacgacgccttgaagcggcgctcaatctctttccagccgggggtgagaatggttttgcccttggcggtgaactcgttcccggcgcaggtgaatgtggcggtgacagcctcatacacatggggcgcggccacagcacacagcagcttgcagcacacaagggacagcagtttcttttcgccctcggtcagcccgtcaaagcctttctgcacaaactccatcgtggggataatggcgtggtgatcggacacctttttgctgttcagcacccggccaaactgcggggcaatgtccagccctgccgcaaaggaaagcagcggccacaggccggacacaatgctttccgccgtaggctgcatatcgtcggtaaggtactggctgtcggtgcggggataagtcagcagcttcttttcatagagctgttgggcatagtcaagggtctgcttggcggtaaatccaaacaggcggttggcctcccgctgcaaggtggtgagatcgtaaaggcggggcggctgctccgtctttttctcacgcttcaccgatacacaaacggcctgcgctcctgcacaggccgtcttggtggcgtcggcgtcgtcggggttcagaaagcggtcgctggccgcctccatgccgcccgccgcgatatggacaacgtggtatttctctttcttaaaattgctgattttggcctcccggtcaaccagcatattgagggtaggcgtctggacacggcccacggtcagggtcttgtggtagaggatggagaaaagccgggtggcgttgatccccaccagccaatcggcccgcgcccggcacagggccgattgatacaagtcgtcgtagtcggcccccggtttcaggtgggcaaagccctcgcggatcgcggcgtcctccatgctggaaatccaaaggcgcttgaacggctttttgcagcccgccatctggtagacgaaacggaaaatcagctcaccctcgcgcccggcgtcggtggcgcacacaaggcccgtcacgtcggggtgttccatcagagagcgcagcacggcaaactgtcctttcttctcggcggggatgatgtactgccactcctgcggcaaaatcggcaggtcgtcatagcgccacttcttgaaacgctcgtcataggctccggcatcggcaagggaaacaaggtggccgatacaccagctcaccagatagccgtttccctccatgtagccgtcccgtttctgatctgcaccgatcacgcccgcaatgctgcgggcgacgctcggtttctctgcaattaccaactgaatactcattccttattcctccttatcctgcgcgggttcctcgtcctccggggtcggttcgtcctcgtcgtcctcgtcctcgccaaaatcgtattcgtccagctcgtcgccgcccttggtgtcggccttgggcttcttaaacttgaagaagtaaagggccgcgccgccgatcagggccaccacaaggaacacgacaaggccgcccatgccgctgcctttcgcttcatcttcctgcggctgctcggtttcctccggctcctgcggttccggctccgggccggtacactcggtcatattggttttacataccgggcaattcgtgttgacggctcccgccgcgcacttggtcgtacaggtacaggtttccggggcggctttgccgtcctcgaacagtgcttgcaggtcagcgtcgtccacttggttgaggaagtgaacggcggtttccttgtcctcgttggcgcggtcgatcaggatataaaagtagttgcccgccttggtggtaacggtgataagctgcttatccccataaaaatcatccaccagtgttgcattgccctccggggtaacaggtacgcccttcggctccatgccgccggtggtgggttcttcctcctgcggtgcctcggtggtttccggcaaaggctccgggttggggtcagtgccaccggcaaacgcggtggtggaaaaggccgtcaggcaaagcacggcggccagcgtcacggtaaacgtgcgaatgatcttattcttcattggcattgtcctcctgttcaaaatccggctgcggggccggggcgctctgcaaagcgccgccgcgcaggaacgccgcaaattcctccggcttcatgttcaggccgcgcacaagctggatgatctgcaaattctcctgctcggtctttgccgcttccagctcacgaagctgcttttgcagctccgcgatcttggccttggttttctcaatgtccttttcgatacggtcaagtttgtttgccatagtcaaaactcctttctggcgtcaaggcagacgcccgtaacaatagaaatgctgctgccaataactcgaattgaggttggtgtaggaaatagggtcgccacagtgcaacatcacggaattgcccacataaatgccgacgtgggaaacgccgggggtgtcgtaggtgccgacgaaaaatacaaggtcgccgggcttggcctgctccggggaaacaggggtacagatattgcaaaggccctgtgcgcccagccgtcccacgtcccatccgctgtgattgattacccagctcacaaagccgctgcaatcaaagctggtgctgggagagctgccgccccacacatacggataacctacatacttttccgcctcggccatcattgcggcaaaggtggcgtcctccaaagcctccgggggaatgtcgtaataggtcggctccttgacggtggaagcgttgggataggtgccgtttgggaacaggtcaggccggttgcccagcgtgtgcatatacaccgcatacaggctcatttgttcctcgcccatgatgtaaacaggcagatgggacatatcgaagttttccagcttcacgttgcagatgtaataggtgtagggaacttgcacagtataggtgttgccctcgctgtccgtccgggtttcggtgcggtatcgggtttcggtttcaatggtctgtgtcagggtatattgcttctcaaagagcatggcaaggtcgccttgcacgtcgcccagcgtatagacgccctcatgcagcgccgacaggatggaagtcagcacataggggtcatgaccgatctcgtccagatcgaaacggtattcgtcatagccggggtgcaggctttcgtagttgtcaagctcatactgcaaatcggcctccatgtccgcataggcggcttccgcccccagcatatcgctgtcctcggacagataggacgtggctgccacgccggttcctgcgctgccgaacatggccgtacaggattgcaggccgcccataatcagcatgagcataaggcccacaccgccgatcagcagcacacctttccagtgccgggccacaaaggacgcggcctgtttgcttttctcggcggcttttttggcggctgcggcggtggtcttggtggcgctggctgcgccctgtgccgtctggcccgccgcccgtgctgccttggcatagtcccgtttgattttctgtttctgccagaaccgggccaccgggtttttcaccgcctgcgccatttccgggttgtcccgcaaggatttctggtagatgtactccgcattggcggcaatggcctttttctcggccttggctgcggcccggtagggtttgagcttatgacgccggatgccgctgcgaatggcttttcccgcttggcgctcggcaagttcttctcccttatggccgccctcgacgcccacattctcatgctcaacctcatggatttttccatgcagatacaggcccgcttcctccatcggacggctggccgggttgggtttgagcttgggggccggtttctccaccttgtcaaagtgcagcttggttttggccttgcccttggcctcgtcatagacggtttccttggtgacgacgcgctttttcggcagggcttctttggctgcgtccagcttatccgcccgcttttccgccttgtgaacgtacttggaaagggagggatcggcccgttcctcggcggtgaattgcaggcgggacgccgggccggtggcctgcgctgccgtattcgcgccatccttggcggcccgcttcgccttgctgcgctcccggatgtccccggcacgttccagcaccttttcagcggtgccgcccggctcggctgcggaatagtcctgttcggcctcccggctggaaatgttgatgctcttgccggtggtctggttgtccagcgtcaggccgtcgcgggtcatgtgctgcgtcaccttatcacggggtttcaactgcttcatagggcgtcacctccttgtctgttccggcagcgcccggtttcgatctctgcaatatagcgcaggatggggtacacctgcgggggaacaactgcgtttcccaaagtctttaaccgttttgccacattcgccggcgggtcgctgattaagtacgggatttgcgccggttctttggcccacatggaatgtccgtccatctccgggggaatcccatcagccattccacccagtcgggattcagtttcacatcccccggcgggctgcccagcagtttgtaaaccgcccatgacagccgcgccgtccatacggttccgctggggttgtattttcggaagctcccggtcggggtcatccgcacatcgacagtcttccccacatcccccgtgtcgctggcaaggggcgtgggaagcagtatggccgatgatgaaagttcttttgcgctcatgccatgcgccgacggcgacagcaggaagtacgaaaaccctaacggcgtagcctgcctgctccaagtcaaaaaccgtcttgtcgagccccagatggatgaagccagcaacattttctccaagcacccaagaggggtgcagttcccggataacgcggagcatttcgggccataaataccgttcgtcctcaaatccccgttgtttcccggcgctggaaaagggctggcaggggaatcccccggaaataagtgtggtggtttctcgtcctgttttttcaaaaaatgcctcctttgtcactgtggtaatgtcccggaattttggtacctgcggccagtgctttttcaaaacttccatcgggaaatccgcccattcgcactggcatacggtggtaaaccctgcggcttccgccgcaaggtcgatcccgccgatcccggaaaacaggctgaaatgtgttaaggcgctcataccgtcgccccctcgcctaaccgggtcgtcatgatctggtagagctgggtgtttttcgggatggggttcttaaagggcaggatcacattttcgtaaatgagaagcccctcgccgggttcggaattgtccacataccgtaattgctggggcgaaatgttcagccgttccgcaaggattttgcggtcgccgctggcttgattgagcaggcaaatgaagtcgctgttttccagaatgttttcgatctccggggagaaaagcaggtctttgacgttctgtgtggcacctgtcggaataccgccccattttctgaaccgcttccaaatctcgcaggagaaagcggctgtctgttcctctcgcaaaagcaaatggaactcgtcgcagaagtaccacgttgccttgccttggctgcggttttgggtcacacggccccaaatctgatcttggacaatgagcatccccagctttttgagctgcttgcccagctctttgatgtcgaaagccacaatgcggttctcgatgttgacattggtgcggtggttaaagacgttcaggctgccgtttacatacaggtcaagggcctgcgccacacggtcagcctccgggatatgctggtctaacagggcttgatgcaggtcggacaggatgggcatattctccgggcgggggtctgccagatagggccggtagatcacctgcacggcacggtcaatgaccgtcttttcgatggcttccagcccgttcttgccgcccatgacaagctcacagaacgacagcacgaaatcacttttcaaggccagcgggttttcgtcctcgctgtaattcaggttgatgtccagcgggttcacatagtttttgctggtaggcgacagcttcaccacctgcccatgcagccgcttcacaagggggtaatactcggcctctggatcacagatatacacatcgtccggggtgcagaggaacacgctcaaaatttctgatttacagctcatacttttgccgcttcccggtgtccccagctttagcccgttgggacacctcgctcgtttgcggtcgagcataatcatgttgccggtcttggcgttgatcccgtaatacatggcgtcgccgccctgaaaaagctcctgcgttacaaaagggacgaacacggccacgctggaagtcgtcagggagcgttcaatctggatgtggctggcccccagcggcaggctgctcataagcccctgttcctgttggtagtccagccgcacaagggaacagttgtatttctgtgcaataccggcagcccagaacacatcgttttccagcttttgccgggtgtctgcggtgttcagcaccaaaaaggtaagctggaacatccgttcattccggctctgcaaggtctttagcaactccttggcgtcctgcccgtaggtggcaaggtcgctgggaagtatatccatgtcgtagccgctgcggacagcccgtttctgttcctgaatcttcatggcgtcaaggtcggtgatcttgcgcttgaccgtcttaatggcgtcgctctggtcgatggcctgcacatggaggttcaccacaatgccgttttccgtgttgagaaagtcggccagcatttcatccgacagttccggggagaggatttgcagaaagctcaccgccccgtatttgccgcccagcccgaacatccgggcattgccgaagcggaacgaggacggggcgataaagtccttggtagaaagccccgacggggcaagccacttccagtcaaaggagaacggttccccgtccgggtggaaaatgctgtgcatgacttccagccgttccttggcgtccagtccccatgcggaggcccccatgctcttgaaatagcccaaaaggtcggtttcgatccggcgcagtctggcgcgggccattttcaggctgtccgcctcgatggtataggtcataaatttccgcttcatcagtccgttgttcccgttcacaagctggtcttgcaaaatgtcggaatactcgctgcggatgtcgtcgaagtcgtccccctgcgcccggatttcaaagctcttggcgtactgcttggggtcgatcttgcggttgataaaggaaaactgcacatgaatggaggcgtccagatagttgtagaggtcgcacaggttttcaaagatggcggtcttggtgtccgcctgcgccagttggtagctgatgtccgtaaactcaatgcacttggaaaaggtgcggggcgtcacccggcacacgccgtcctgatacatggcctcatagggaatactgacctgcgccgaatggggcttgccgtcgcccttatactttcggatgacggcctgaatctctttcttttcggcgcgggtgagcttgaccggcgcttttgcgctcgtttcgttcttttgctttttggacaatggcgttgacctccttttccatttgggattgccgtacaagggcggtataagcgttgttggtctggtagggccgttccttgggctggatgaagcagcactctacgatctggcgcaccaccacttcaaggggctggccgtgtttttcgtaaagcgccagcagaaagcccggcagcatggcaaacaccataatgagcgccgccgcgctggtcgggacgcggccccggatcaaaaagaaaagcgggacgccaacaagcagcgcaccgccaaaacaaatgagctggcgtttcgtcagcccgaatactaccttggatttgaccttggttaaatccttggggacagttacataagccataaaaagtcacctcgtttctttagtgggcggtaaatacggccttgctgatacttcccgtcttgaacagacagaagcaaagcaaaacggtatagcccatacagccccagatcgcaccggatatgtcgtcggcggttccgatctgctggatcagcaccgcataaatcccgacaaccaccatgattaaaaaggcttggaagcccagcgcaagcaaggatttcaagtagttctggcccatgccgcgccactctgcattgcccagcgtggcaagggggatcggccccaatgcggtcacggcgtaaatttcaatcattcttccataggtcacaaggaaaatgcagatggaaagaatgttcatcgtcagccccacaacaagggtctggaaccacaggcccagaagcggcccgatgtccattgcttcaaggcggctttccagatcagggagcagcgtgtcaaaatcaatgctggtatctccgataatcaccccggcgctctggttgacgacctgctgggtggcgtcaaacacgcccatgacgatattccatgtgttcgtcacaatgaggatggcaaaggcgcttttgaaaatccagcggaagaacatggagctgtcgaagtcgtgcatattgttcttttccacaatcatgtcgatcagctcatagcacatcacaagggcgagaatggccgccgcaatggggacgatcaccgtttcggacaggttttgcagcatggagaaaatgccgccgttccagtcctgcggggtactgcccacatccgacgcgatttccccgactttggtattgaccgtgttaaacaggccggacaggttgcccatgataccgtcgatcaggattcctttgatccattccccgattaaatcaccgatcatgtggggacacctcctttcccgcgccctcccagatcagagaggacgcggagggttttctaacacacatggggttatcccagcagcccggacagcagcggaacaagggtcatgccaatgagggcaacgccacctccggcgacaagctgcttgattccctgtgactttaccgatgtgtgataaagaagtaatagaagtgtaaaaaattttgccgttcctatccggcacatgaggtatgtcggataggtcgggcggttattcgggcaagtccaccttgccaacaaaagaataataaatctcaatgtcctgcctacgggtcttgttctcgtcatagctgcactcatgcacaacgattttctctacaaactcccgcaacagagtaggggtaagttcttcaaagctggtatgccgccgaacaacattcataaacttttctgcgttcacggtggcttcctgtgctttggaaagctccgcttggatagcagcggctctttctttcagctcccgttgttctgcttcatagtctgccgacagctctgtgaaacgctcgtctgatatgcgcccggtcacgctgtcctcatacagccgcttgaaaatagcggaaagttcaccgatacgcttttcggtggcttccagctcctttttcttggcggcgttcctgcgcttgcccccgtcctcgttctgctcaatcaagagcttcataaaccgagcttcatgctttgccgcatagcttgtcactttccgcagattggagagtacgccagcggtcaagaggtcggtgcggataaagtgcgccgtacagtcatgggtgcgtttcttgtagttgccgcagatataacagtcctgcttgcgcttgtccgtctggtatcgctgctgatacatgacactgccgcagtccgcacagaacagtatgccggagaacaagcccacttcatcatagcggttggggcgtttgcgctgcttgcgaagttcctgcacccgttcccatgtctgggtgtctatgataggctcgtggtggttctcgaaaatcacttgcttttccaggggattttctacactgtgcttgactttgtaagagagcttttctgtcttgaagtttaccagacagcctgtgtattcccggttttcaaggatatgcacaacggtattggtcgcccacttgcactcatagccggggtggtagcggcgggtgctgcccgtcctacggtattccagcgtccccggcgtggggatttgctgctctgtgagcatacgggctatcttagtcggaccgttcccggcaaggcagaggttgtatatctgcttgactacgggtgcagcttcctcgtcaataatgaaattttcgtcctcgtccatgaggtagccatacacaggcttgcttgtgatgggcttgccactcatgccttttgagcgttttactgctttgattttcttgctcgtatctctcaccagccattcgttaaagatattccgcagcggggcaaagtcattgtcgccctgtgcgctgtccactccgtcattgatagcgatgaagcggacacctttctgtgggaaaatcatttccgtgtacattcccacttgcaggtagtttcgccctaacctcgacatatcttcttgtgtcaagtaggaactaaaaaatttttgagattttacaaaccgttcataggtggatgaccacccgtgaacggcttgtaacattcagcctattagatttctgcatcctcaaagatgtctttgaactgccagacgatttcgatgctgtcatgcccatgaatatagatagcggagattagagcatgagcaagctcgtatgtaagccctgcgcctttctggtattcgccgagcaccgcatcaagcctttcatccgaacagggatgttcagaatcaagctcctgcatccgctcatggccttgccggattgcttcttcattctcagacatcttcgcgtctgtttctgctttccgcttgagatattcagcctttgtgatgctgccggaagtgtatttctcatacagccggagcttcactgccttgagctgttcgtactgcttctgcaaatcgcggattgcatccgcgcattctgtgatggcagatttcctgcgcttgctgatctcatgctctttaacagctttcttttcgaccagtgtgagcatttgcccaatcgctttgtaagcggtgtcctcaatccatgcctcgctgtatctttcaccaaccgggcactccgtatcgcggtcatgtgttgagtaagtacactgatagaaatatccaccctcatttcggagctttcgccgggtaagggcgcgtttacagttgccgcagcacacaagacccttgaggggataatagcgcagattccgtttaggattcttctcgccgccccggatgactgcctgagccagctcaaactcttccttgctgacaatggcttcgtgcatcccttcgacgatgatccattcctctttcttttgagaaatagttttccgagaacctacgccgccggattttcgcttgtggccgaccgttgcccctgtgtaaacatagctggtcaggagtttgtagaccatagatgccgtccagcttatcttgtcgctcatatagctgaatttcttcttgtcaggatgtttgcctttgaaatattgcccgggcgtcgggatattatcatcgttcagactgagagcaatctgtgaggtattcctgccttcaagggcttcatcgaagaccctgcgcacgacctctgcggcctccgggtcaagcttgagcttgttgcggatttcgggatgaagcacatagccgtaaggagcgtagccgcccacatacttgccttgcttcatcatctggatttttgccgttgtcgttttgacagaaagatccttgctgtatgcggcatagatgatgctgcgcatgacaacctcaaggccaccggttgttcccttgtaatcgtcgctgtcatagccgtcgttgatggagataaagcgaacgcccatgaacggaaaagtgcattcgagataattgcccgtctcgatgtaatcacgagaaaagcgggaaaaatctttgacgcagatcaggttgatctccccgtgccggactttctccatcatcgccgagaactgaggacgatgaaaatttgtcccggtatagccatcatccgcgaactcaagcctcggatatttggaaagcatcggatgcttgtcaaggtagcggttgatgagcatacgctggttgccgatgctgtcactctcagccttgttgccggtaccggtatcttcatcagccatagagaggcggatgtagatgccgattgtgtagtctttgctcatttacatcgccccctgtacttctttgatactctggatggtcaactcgtagatgtcgccgtacttcataaccagctccacagcgccgccctcatggactttgaccaattcaacagactcgtctactaaatcctgcgtgagccgtgtcgccgtgctgacggatttcatcaaggtaatccacttgttatcgaccgacatggcctcgttgaacttgctccggcgctgcacagcctcatccagacggcgggacaggtcagcgtattgctcgtcgtagctcttcttggcaaaggcatattcctcttcatccagaagcccctcggcataatcctcatagaggcgtgtccgcttcttggaaacgccgttgagcctcagattcaggcttgtaatgagggcgttctgctgatcacggatgtttttctcgccctcgcttcccctgagcttatccagcagcttgtcatagtcaagcgctgcttcgacttgaagctggattgctgcaagcacattggcttcaagcgtgtcctgcctcgtataatgggaagtacaatgctcatagcgccgacctgctgaggtactgcattcatagaaggcataccagcgcttccgcttgtccttgtcgatccgtttgcggtggaagtacatcttcttcccgcaatcagcgcagacgattttcccatcgaagaggtttacgagcgttgcccggatttcctcggttttctgcatactcgtctggcgagcctcagaagccgcttggaggatgtcctgcaccttctggaagtcttcacgggaaataagcgcttcgtgcgtgttcgggaacacaatccacttatccttgtccttgacattatgggatttgatgcccttgtagatcgccttcatggagcggccaaggacggtatcacccacataatgcggattgctcaggatgccgtacagcgttgaactgtaccagcctttgcaggagcagccgtcgcctttgcgggttccgttctggcgtttccgcagctccgtatttggcgcacccagccggtcaagctcgttaaggatcatcgggattgaccagccctcgattttccactggaacatgagccgcacatacggcgctgtctcttcgtcaataaccatgtttgtatggtcttcattccaccggtagccatacggaagattgcgcttctggaaggtcccttgctccatctgtgctttcaaagcggtggagactttccgtgaaatatccttcgagtacagggcgttgatcatgttttgcagcgggatcatcaggctctcatttgagccgtccgtatcaaagttgtcgtagtgttccttgattgcaataaaccgcaagccaatctgtggaaaaatgcgctcaaggtaggttccggtttctatgtagtcacggccaaaacggctgagatcgcggactacaaggcatttaatcctgccgctcttgatgtcggtcatcagccggttgaactccggcctatcgaaaaccgtccccgtccgtccgttatccacatagacatcgacgagatcgagataaggacatcctgcgatataggacttgcatatctcgatttgattggtgatgacatccaccttttcagatttgccgctattctccacggagagacgggcataaatggctgtcgggaagatttgcagcggtgctgcttcgcaaaccggctctgcggctgcgttttttctgctttttcgtgccatacgctcatccctcctttatccggcaatggcaagttcgtcggcatagccgagaacatattcaagtgtctgctgatactcgtctttgtacttgaagacaatctctatcgcgtgatcctcataaatcaggatgcggtcaaccagcgccatgaggacgcggcggttcagttcttcaatgttttcatactgcttaaagagcgtgacccaattccgttccgtagccccggttgtgaccgactgcttcatttcttttttcacgcggagaagggcttcctgcttttcctcaatgattttggtgtagctgttgcggaactcaaagtattccgacttgtcgatgatcccatccgagaggtcttcatacagccggagcttgagcttctgataccgctcaatctcttcttcgagcttcgcaatctgtgcctcatagttaaacgctttgcgattctgggaaggaagcctctcaatcatctcaagcgctttttccaaattgaccacaagctcaatctggtcatggatggcacggaacaccttttcctcaacctcttttgcgctgatgctgtgcgggctgcaggtccggctatgtttgttcgtcgagcagacatagtagatgtatttctttgtcttcgacgggacggtcttgcgtgtcatagactgctggcagtctccacagaacaagaagccggaaaacaggtgtgcctcatcctgatccggcgagcagcgcatatctcgcttcatcatggtcttgacggccatgaaatcctcataggaaacaagcgcttcgtgcgccccctcgaccttaacccactcggtttcatccttcggctgcacaacgcgcaccttgtagtttggcgtaccgcgtttgccttgggcaaggacaccgatatatacctcattggtgaggatgcgctggacagccttgtaagtccactttgcagtgtcgccggtcttgaagacggtatcgaacttcactcccgccgagtgcttatactccattggggaaagcacgcccatctgattcagccttgcagcaatgcgaccgatggagaagccatccttgtacatggcaaagatcatctgcacatactcgctgacggcctcatcgacgataagctggtttttgttatccggcgatttcttgtagccatagggcgcgaatgccccgacgaactcaccgttcttttgcttgacctccaagctggatcggattttcatggatatatccttgcagtaggagtcgttgatgaggtttttgaacgggataacaaaggaatccgactgcggatcgccggtcaggctgtcgtaagcgtcgttgaccgcgataaagcggatgccgagctgcgggaatatcttttccagataccgaccgccgtcgatgtagtttctcgaaaagcggctgaggtctttgaccacgatgcagtcaatcgcgcctttgcggattgcgtcttcgagctttttgaagtttggacgattgaaggaaacaccgctataaccatcgtcaacgaacggctcacagacaatttccagatcgtcatgccgtgcaatgtagtcctcgcaaatggctctttggcttgcaatggagttgctttcaactttgtccccgtcttcacgggacaggcggcagtaaatcgccgtccggtaaacttttccgggcataaaaataacctccgttttctgtttggtgtgatacatcaaatcaggaagacgaaggcttctgcttcttgtatgaggaaaacacgataaagccacatgaccctcaaaggcagcggcttagtccgtgtattcttttttgacctgacttcattgtatcacaggctcaatcgcttgtccatagaaccgggcgaaaagattcagtttgttcataatcaaagtcctctcagataatgttccagacagtcctccaaggtggtgtctgtcttcgagaagctgatcttcacgacggtcttcccgtccagatagcaatacgggtttctgatctgtcggataaaatcccgcagccggtcatcctgcgcagccgcaggctcaagccggatgctgtcccgctggacaagggtactgcggtcaaccgtcttcgggttgacgcttctcatggtttctacgctcatcatattacaaacacctccctgatgatgtgaacttgtattcaggacaaaaggatatggcggagcgccggttagggacactccgccacatagttttcatcctgaaaacttgtatgctgaatgtagctaattggtttgtttcgtgttccggcatatttgcagctcgcacccctgccagaagagccttgcggctccgggaatgctacggactaccgacggttaatcggtatcatgggactctcacccctccgaggaacgctccgagccgcccccggcaatccggggacggaagtatcattatacccaacttctccatcatggcgaacagccgcaccacacggcagtttagcctctctgttgatcgctcgcttccgtgaggaaggtcttggcggcagaaggcaagtcgcttcgagaaaagaggaaagatccgcagcactggatattctgttatcaacgcctcatgaaatgccatcacagctgagaatgaaaatatagtctgtgcgttaaccgaaggatttgctaaactgaaaacagcaggcgtagtccggttgcaccttggtggattttcaccccgtttgttcaacgtggacgagttgcccaagagaacagcagtatgttgcgtcacgtaagtgaagagcacgagtagcaaagttcggatacccacccgggcaattcccagcctgcataattcagggagggatttgatgcaagacatattgacctgcgccatgggactggatattcatcgtgacgttatcgttgcctgtcttgccaaaggtgagctgggcaccgatccggaaatcgagatccgctccttcagcacactcatcccggaaatgcggaagctgcgggattgggtgttggaagctgagtgccgctatgtcgctatggagagcaccgggatctactggcagcccatttacgaaatgctggaaccttgttttgatgggcagatcaacattctggtagtgaatgcccgccacatgaagaatgtgcctgggcgcaaaacggatatgcgagacgcgcaatggatcgccacattactccgtgccggattactaaagggaagttttatcccagataagaccttccgggaactgcggcatctgacccggtatcgtaagagcatcgttcgcgacattaccgcccaaaagaatcgcatcgataaatttctgcaaagctccggtttccgcttcacagcgtttctgtcggacgcatttggcgcttccgggcgaaacatcatccgtcatctcatggaatacggaaatatttcgcgggaagctctggaccggtgcctgaaaacgcagacccggaaacgtatcgacgaaatactgattgccttgaacggttcgctctcggagcaccagcgcggctttcttcgcatgatatttgggcacttggaagcgcttgaacagcaccgccatactgtggaggacgctattacgaaagagatcacaaagcacgaagaggcattgagcctcctgtgctccataccgggcattgatgtaactgcggcagcagccattatcgcggagattggtaccgatatgagtgcctttccggattcccagcatatatgctcctgggccggtttgagtcccggtaacaacgagagtgccggaaaacgcaagagtgctcacattaacaaaggtaatccgtatctgaagagtatgctctgcgaggtgggatgggtcatctccggaaaacgaagcttgtacctctccggttggtactggaggataaaacagcggaagggcgctaaacgtgcaacgattgctttggctcgcaaactgctggcgctgatttacacgatgttgaagacaggttctccatacaacgaagactgttttgagatccgcagaaaacaaagtgagcgcaaacgggccagccgtatggtgaacgaactgcaaaagctgggatactttgtggtggcaccaagctgattcccactactccatacttcggccggcgacaggttttggcctgccgctttttgtgctgcgatggtttttcatgaggcgttgaaagcctgtttgtcaaggttcacgccctcgctacttattttcgtagcaaggtactgtgaagccggtcttgattgaccccttcactttacaacggacatttttcccgcaaaacttggcacccctcagaaaaaaatttttgctttttttcggattgcggcaacgagcttgcagacacgggagatggaaaggccagaagaagcagcatattcctgctggcttcctccatactggatgcaaaagagaaagacttctctttctctcgccgtcagttgctccataaattccgcttcctgtattttggtaacaacctcgtttgtgaagtcatgggggtcggctaaccaagtcggtgcgttgacttcatcctctgggacagcatccagagacagcacactggaaggctgcgtttcctcgccgtcttcgctgtcagatgctcccccggtatcgtaggagcgccggagcttcttttcctcattgcggagtgctttcatgacctcgcggtcaacctccgtagtctcgccggtggccttcacgcgcaccatgcacttgccgtcctcggtagtccagaggtcgtagtcgaattcaacgggtgttttggggattcttttcattgccttgtcctttccgctggctcggagcagcggatggacaagactaaaaaagagccgcatgacggtgagctgatcttcccataccgacaaaacagagcttagaaaactctgttcatgcggcattaggaagactcaccaatcagcggctccacagcacagctataaaatattgaattgtatttgttatctccttaccttctgtgaaggcggaggtataaccgtctcatgttgatcacatcaaatacggtttcccggccacaggctttgcacttggcctgtatgtgaccacgggaatcctcgaatacggcgatagcgttgtgcccacaatatgggcatttcaccatgcgcatcttctggttgacaatggcgcatcgcgccctacggattttctcctgcatttcaggggaaggctcagacacacggatgcttttcttcatgcccacacctccaatggatcgctgtactcgctatatgggcagcactccaagtggccgagctgtttcagccggatgactgcggctgtcttggaaacgccaaactgcttgcagatcaaatccagtgcaaccctgtcctgatatgcgaaagtcccgtcatagctgacaagcctccggcctctggcataatacgcaactgcgagatcaatttcccgctggggcatcagaatggctgcgcctaagacattggcttgccattcattccagtcttcatgggttttcagttcccggagcgaataggctgttcgtgcagaatatttccgctggcagaccttccgaacttcttctgtctccatctggaacaggatttgatgggcgcactcatgggcgagtgtaaaccgccttttcccgcagagcttgcgtatctggaatggctgaataaagctcgcatccatcaagacctgattgcggcgcagagggatggaatattgcatcccgtctttctcaataatgtactcggtatctgcataagccgtcagcccacagatacttccatcggcagacaggtcagcaaaagagacattgaggccgagatattcgctggcaaactggtcaatcggcgtaccgcgaggcaaacgcgccccatcggtatcaggaccgaaaaagaactcgttgaagtccttagtgaccgccaccgcgatctcttcaatttccttgtgtgataaaatcatctcgctccctccttcgcttctacaaaccatttgttgccttcttggaaaagataagattcccttccacggatcatcacagtataacggatgccaccaccgcctaccttcttggaggcggcacggcatttgtacaggatctggtcaatctgaaagatcagaccgttttcccaacggatgaaccgtggatgacagactccttcttcgtcaacatccaagttgaccgaaacatacgccttccggcaatgtgtgttcgtcatagcctacctcctactgtcttgaaagttacgcaaaaccacgcataacctatttgttcttgttgacacccgcactgttcgtgtggtattattaacacgaacggtactttcgtgttcgcaatgagtataacacgaacagtattttcgtgtcaaccactttagcgaaacttctgttcgtgttcacaaaaagttttagaaagaggtgccttatgagcttcaaggacagactaagagaaaaaaggttggaagcgaatctcacacaggtgcagcttgcggaaaaagtgtcgataagcgcaaggactattcagaattatgagttgggtacccgcaagcctacgaagtacgaggttgtcgagaaattagcgacggttttagataccactcctgagtatctgcttgggcaaagtggaatgcttgttgtcgcggcgcatgagaagggcggctccaaagcggccagagatatagatgagcttgtcagtgaagtgaccggtatgttcgccggtggacggctcagtgacgaagcgctcgacggcgcgatgaaagcgttgaacgatgcttactggatcgccaaagagaagaacaagaagtacactccgaagaaataccgtaaggggacaagcaaacagtaaggtgtttcgctgtttgcgatgttcccatcagcgggaggtgagacgatgaatgctgaaaatctctcgaaggtcggcagcagacttgtaaagcgctgcgggacgcgagatccgtttagcatagcacggcagcttggcattgaggtcctgttctgtgaggacttcggccctctgaaaggaatgtaccgggtgatcaagcgcagccgttttattttcataaacgaaaacctgagcgggcggatgcagcggattgtctgtgctcatgagcttgggcatgaccagttgcaccgcaatctggcaaaaggaagcgcaatacaggagttcatgttatatgacatgaccacgaagccggagtatgaggcgaacatcgttgccgccgaaatcctgctcgacaccgatgagattcttgagtacatctatgactacggctatacatccgagcagattgcacgggcaatgggaacagacatcaatttggttgccttgaaaattgcccacttggcggaaagcggatatgatctccggcgtattgaacataggagcgacttcctgaaatgaagaccttagagggaggcgacgaacgatttgaactatgactcctatcttgcccgtgccatagaaatttttaacgacaagatggatgcagacttttcccacgatcatgtcatcctcacctgtttcatgaccgacgatcaggaagaaatctttgagcagttctgcgctcagtatttcccttaccggctaaaagaccggtatcaggaggaaggctacttcgatttccgggcatcctcctttatcgggatggacaacggaggtaaggacggcatcctgctccgcacggacataccctaccatcctgttgagctgcttcatatcttcctgcatgagctggcgcacatttactgcgtccatcatgaactggatgggaaaagcttttatgacgaatactgtgaaggctatgcgcaatccgacgaggaagacggcatgatcaacgccggatatgccgtctggcgggagtgcattgcagagattattgcgattgaatgcgacgataactgcgacatttttccgatacgcgacaaaaagaaaatgctcgcccaactcagggacgagatcgaccagcgggacggcaagctgctcgtaagcgagattctaacagcggtgatgaccagttctgaggtcgaggcatcccaaacatgggacgaagctgagaaagcgatccacagcttaaagctgtttgatactgcgccggagatggatttgatgaggcttgtcttcaaccagctccaggacaggctgattgaaattgatattgactatatttcagagctgggctatctgtatctgaataccctatccttgaacctactgaggaaattccagaatacatgaggtgcagcattgtagagaggataacaagatggagaacatcgtatttgagcgtaattacgaaactaccgaaaaagatgaccgcgcaacggctgtatttgagcgagcctttgcccccggtggctttatggaagagtttacaaagaaaatggacgcaatcccgaaggtggttgtgccgaaggataaggaaaattacgactatctgctcaaccggtgcgatgactatgcaaagcggcatcacggaaggattcgcggcgttgtggactatgagcactgggacacgcacatcgacctctatttgagaatgctggaatttgacgatgcagaggatatggcctttgtaaaagacatcggtgagaaagcgcactacctttgcatcacgccggaagaaggcggcgggtaccgtgtccatatcatgatcaactattttgaagagctgatgtccgaagaataccgctcctacctcaaatatgagacgcttatggaggatgaagaactggcctccatgtttgacataccggagttgtccccggaggaagaggcagttgtccagttgatcaatgaaatccttgaccggtttgataacgaaacccaagtggacaggacaacagccttcaaggctgcaatccgttatttgatggagcaggatgaagatgaagcgatgaaccttgaaaaaatcgccgcaacgctgacggtacttcttgaaaatgtgctggacgaagaaaagaatgtggaggaacaagagtcatgaaatatattctctatcgctcttttggaaaccttgataaggatattaaaaagcatgagttagtggccgttgaaaccggaaagaacattgacgatgtaaccgatgccctgattaaagcggtagcggatgaccttgccggtatgccggaatatgagcactgtgagacagcggcctacgcacctgagccggtcaaagactttcggaaggtgcggcgctatcaatacgagatgacgggcattgtttatccgcccaatgccgataagaacatcctgattgactatggtatcgtagaggcagaagaataagtatattttgaaaatgaaaggcgggtggtaatgtgcctcttcaaattgtacgaaacgacatcacaaggatgaaggttgatgctatcgtcaacgcagcgaacagctcccttttgggaggcggcggtgttgacggctgcatccatcgggctgcaggaccggagctgcttttagagtgtaaaacgctgggaggctgcgaaaccggcagcgcgaaaatcacaaagggatatagactgccttgcaagtatgtgatccatgccgtcggaccgcgctggcggggcggtaaacacggagaacgggaaaagcttgtctcttgttaccgcacttccttggcgctggcgaaggagcacggctgcgagacggttgcctttccgctgatttcatcgggtatctacggctatccgaaagaccaggcattgaaggttgccattgacacgatcagcgacttccttctggaaaatgacatgaccgtctacattgtcatcttcgaccgcaaggcatatcagatcagtgagaagctgttctccgacattgccgcatacatagacgatacctatgtagacgcgcatacggatagccgcgcttcgcagcttcgccgtatgcagatgctttcggaggaagcaatatgtggcgctccaatggcggcaaacgcgaaaagccttgacgatgccctttcgcagatcgacgagagcttttccgagatgctgcttcgtaagattgacgagaaaggcatgaccgacgcgcagtgttacaagaaagcaaacatcgaccgcaagctcttctcgaagatccgcagcgaccggctgtataagccgtcgaaagccacggcgctcgcctttgcgattgccttggaacttccgctggatgaaacgaaggaaatgctcatgaaggcaggctttgccctttcacactccaacaagtttgacatcatcattgagtatttcattgagcacgggaactacaatgtcttcgagatcaacgaggctctgtttgcctttgaccaaagcttgctcggagcgtaaagtctgaaagagatggtggaaaacatgaatgtcaaaaaaacactcggtattggtataggagttgtcattgctgggcttggcgcatacaaatatttcacaggaaaggaacctcaaaaatacagcaataagtggtttgacacggtatcagatgaggtacttaaaacggaaagagaagttgtgcgaaaacagttctgttctgcgggagacgatttttctttggctgtgaggttagaaaacctcttgcgagtatttgattctgttttaagcaagcgagcttggggcgatgaaactccccacggtccgggctatcacagagaacacggatataatctatataaagatgactaagcgatcctatctgtttgattgaaaggaggcagccggagcatgaagcagcgcacctatatcgcaatcgacctgaaaagcttttatgcttcggtcgaatgccgtgaaagaaacttagacccgctggacacaaacctcgtcgttgcggatgagagtcggacggacaagaccatctgccttgcggtcacaccttctctcaagagctatggtatctccgggcgcgggaggctctttgaagtcaagcagcgcgtcaaggaggcaaacgcagggcggcagcataacgcgccggggcgaaagctggaaggctcgtcgtacctcttctctgagctgcaagagaacccgtccctcgccattgacttcatcattgcgccgccgcgaatggcatactacatggagtacagcacccgcatctatcaggtttacatgaggtatgttgcgccggaggacatcatcgtctactccatcgacgaggtgttcatggatgtcaccgactacctcgccacctataagctgtctccccatgacctcgccatgaagatcattctggatgtcctcacgacaaccggtattacggcaactgcgggaattggcacaaacctctacctctgcaaagtggcgatggatatagtcgccaagcatattccggcggatatgaacggagtccgcattgccgagctggatgagatgagctatcgcaagacgctttggtcacaccagcccctcaccgacttttggcgggtaggcaaagggtatgccaagaagcttgaagaaaatggaatgttcacgatgggcgatgtcgcccgccgctccgtcacggatgaggacttgctttacaagcttttcggaaagaacgcggagctgctgattgaccatgcttggggctgggagccttgcactgttgaggcagtcaaggcgtacaagccggaaagtaacagtttgggatcgggacaggtactacaccagccttatgaggcagacaaagcgcggctcgttctccgggaaatggcagaccttctctcgatggacttggttgacaaaggctttgtcaccgaccagctcgttgtcacgattggctatgacattgagaacctgaccgacccggaacgccggaggaagtatcgcggcgaagttgtgaaggatcactacgggcggcagataccgaaacacgcccacggcacaatcaatctggaacgctacacctcttccacgaagcagatcatggatgccgccggggaattgttcgaccggatcacagacaagagcttgctcatccggcggctgaacatcacagcgacccatgtgattgacgaagcctctgctccttcttctaaggacaattatgagcagcttgacctcttcaccgattatgctgcgcttgacgcgaagcgcaagcaggaagacgaagagctggcacgggaaaagaaagtacagcaagccatgctcaccatcaaaaagaaattcgggaaaaacgccattctcaaggggatgaatctttcggagggagcgacggcaaaggaccggaatgaacagattggaggtcacaaggcatgagcgatgattacaaggacatcatcaatctccctcaccatgtctcatcaaaaagaccgcagatgccgatgctggacagagccgcgcagttctctcctttcgccgctctcaccgggtacgatgacgcaattcatgaaacaggacggctgacagatgaaaagatcgacctcagtgaagaggaaaaagaggcgctggacagaaagcagcagatcctcatggaaaggcttggcgaccatcctgctctgaccgtaacctacttcgtcccggatgcaaagaagtccggcggagcgtatgtgacaaagaacggaaacctcaaaaagatagacgggtttgagcgctggatgatgctcacagacgggacaaaaatcccgctggatgatgtcgctgacatcgagagcgaattgttccgcgatatgttttgaatgtcgctttccatgcgaccaaaccgaagacgatttctcctatactgtgactgtaagcaaaagcagtcacagtttttctatatgggaggaatcatcatgaaaaagaacttaaccgagatcgtctttatccttgaccgcagcggctcgatgagcgggctggaagccgacaccatcggcggcttcaactccatgatcgagaagcagagaaaggcagacggcgaagcgcttgtctccactgtcctcttcgacaatatgagcgaggtgatccatgaccgcgtgaacatccatgacatcaagccgatgacagacagggactataccgtccggggctgcacggctcttctggatgccatcggcggtgcgatccatcacatcggcaatgtccataagtatgcccgaccggaggatgtcccggagcatacgctgtttattatcaccacggacggaatggagaatgcgagccggttttacagcagcgaccgggtgaagcagatgatcgagcggcagaaggcaaagtatggctgggagttcctgttcctcggcgcaaacattgacgcggtggaaacggcgcggcactttgggatcggagctgaccgagccgtcaattaccactctgacagcgccgggacgcagctcaactatgaggtgctgagtgaggcaatttccgccgtccgttgcagcgccccgctcggcgcagattggaagcgccggattgacgaggactacgagaaacgcgataaagggaaaaagaaataagctgcacaagcatgagggaaggcgctttcgagcgccttttttatatctgctaccaagtttttcgcaaaaattgtccgttgtaaagtgaaggggatttttacggggaaaagcaccgggaatacgattttgagagaatagcaagcacagccggtgtccgtacacacggcgattttcgagtaagggaacccttactcttcaaaatgcttgttgggatgtctcccaaaccctctatctttacgaaaggacagattgcctatggcaaatagaacaaggccaatacgcattgagttctgcgtgtcagaaaatgagcatcggatcatcaaatcaaagatggcgcagctcggaacaaagaatatgggagcgtatctcagaaagatggcgattgacggctacatcatcaaggtggactacacccagcaaaagaagcttgccgccgctgtcagccgtgcagcgtcaaatatcaatcagatttgccgccgtatcaattcaaagggaaacctttatgaggatgatgtcaccgagctgaaagagaggcaaaaggaaatatggcagttactaaaatcaagccaatccgaggaactgtaaacaaggcgcttgcctacatcctcgacccggaaaagaccgatgatcagctctatgtttcctctttcggctgtgctgccagcgacgcggcggcaaaggaatttgagtggacacgaaaccttgctgcccagcaaggaatgcagatgccgaaggtgattgcccgacacctgattcaatccttcgacatcggagaagtcacgccggaacaggcgcatgaaatcggaaagcagttcgcagacgaatggctgaaaggcaagtatgagtatgtgattgccacccacatcgacaaggggcattgccataatcacatcatcttcaacgctgtcaattttgtggactaccatgcctatcggagcaacaagcgaacctaccgggaaatgcgccaactcagcgatgaaatctgcaaggaacatgggctttccgtgatcccaccctcacagagcaagggcatggactacaaggaatacacaaaggctaaacgcggcacaagctggaagcaaaagctcaagcagaccatcgaccgctgcatcatcacagcgaaggattacgatgagtttttgaaactcatgcaggaagccggatatgaaatcaagaccggaaaatacatctccttccgtgctgagggacaggagcgttttacccgtgcaaagaccatcggagacaactacaccgaggatcggattaaagagcgcattcaggggcgcgggaaccgcaagcgccagatgcagacctctcgccggggtatctccctcatcagcgacattcaggagcgcatccagctcatcggcagcaaaggttacgaacacaaagcgaagctcaccattctcaaagaggccgcgcgtactctcaactacctgactgagaacaaccttctgcaatatgctgaccttgaaaagaaagtcgaggacattcacagctcctacgcccgcaccggcagtgagctgaaaaatgttgaagccagactgcgtgaggtgcagccgcttatcaaaaacatctcgaactaccagcggctcaaaccggtttatgatgcctatatgaaggcggcggacaaaccggcataccgtgccaaacacgaagcagagcttgtcatctatgaggcggcaaagagcactcttctcgccatacaaggcgacgggaaattgccgagcttgaaatctctgcaagccgaacagcaacggctcgtggacgagcagcagcgcctttatgacgaacgcgccaagttgaaaaaagaagctcgcctgattgacacgatgaaggcgaatgtggatgatttcttcagtccctcgttggcaaaggaacaggagaaaacccgcagcggagaactcgaataagcaaaagaaaaaggctcaccgaaacctactgcaagatttcggtgagccttcgttatttcagggcttagcttgttttgaatgcttgatcatcgtgtcgatgacatcataaatctgagagcgatcctccgcagaaagcttatcgagcttttgagccagaagcgaatcttttaccaaatacccattgtcaaggacatccacaaggatcatatccgctgaaacgccgagagcgttgattatggaaatcaatgactcaagagaaggcgttttttcgccgcgctctattgcgcctacatagttaatactcaggtcggctttttccgcaaggtcctcttgacgaagcttcctcatcaggcggtatttgcggatatttttgccgatggactcaagcctcatcacagcacctcctatcagcgtggaatacacactaatagtataggtgacgcagctatcactatacacattctatatggaagccgccaacgctaatagcgttgatttgttcgtggagttgtgctatccttttattttgaagaggtgtatcttgagatgggaaaagaagcgacagcgaccttcattggtcacaaagaatgctacggtgtccaagcagaggatgtccagcgagaagttgaaaagcttatcgcctccggggttactgacttcttaaatggcggcatgggcgggtttgattggatgtgcgcaagggttgtctttgacctgaaaaagagctatccgcagataaggaactaccttgtcatcccctacctcacttttaacattgccgagccaaaatacttcgatgacattatctatccagaaggctttgagaagtatcattttaaggctgcgatcccagcaaggaaccggtatctcgttgataacgctgcatacgccttgtgctatgtgactcacggctggggaggcgctgcgcaaacactcaaacgcgcccagaaaaaagggctgacaataatcaatttaggagagaggaacgatgggagagataatctatgagaaacactttcaccaagaaaccatagaggaaatcgagagggaaagaatcgacttcttagaagccttcggagaagatgcagagcaagcaccttcgttcgacgaaatcatgaaaaagatttatagcaatgtaacttaccttgtcttgccggagcgcgagaaaatggcgaaaaccttcatcaaaacagccatagaaatttccaatgactatgagctggatattgagattgaggaacatctgagccacatttctgccacctactattttgattgcggcgcgtgcatgggcttccttagaagaattattgagatgtcggatgacatctccttctttgaccacattaagggctttgatatggtcatgtccctcgacttttacacaaaggctgtattcaaaagggatcggcttatccacccccaatggtctgacctgagtctctgaaaggcgctcgggttttgtttttagatgttcactccaagaacttgaaacttttttgtaaatacacaaaagatgctgttgcgtgtttcgagtgtttccgctataattataatgtgtttttgtagcctcgccgtatctcgaaaaacaaggagcatcgacatgaaaataagttataaaaaactgtgggtactgctcatccagagagacatctcaaaagtaactttgcgcaaagaggtcgggattgcagctggtacgatgagcaagctcaacaagggcgaagaagttgctctccctattttgctacgcatctgcgattaccttgattgcgatattggggacatctgcgaagctgtacgcgaggaaaaatagtccagcaatcaaggaggtcaacaatcgagatggaacgaaaagaatacagtgcgggcgcagtgaagttatccttctggtttatagagttccgcaaagtggtggagcttcttcatgaaggaaagaatgccgaacagataaaatcccttgccctgaacgagaacctgtttgcagccccgactactctccgagccaatcagatttatcatactgtcacaggccgcatcagggctttagatgaaagcttcatcccgcttttcacacgcagcgaccttgcaacgcaaaagctctttgccctaattgctgctatggcgtatgacacgcttttctttgattttgtctatgaagtgatccgggaaaagatgattctcggcacctacgagttttcggacagcgatgtgcgtgtttttttcaaagataagcaacagcaaaatgaaaaagtggccggatggacggacgctacattggtacggcttggccggtgctataaaacaatgctatacgaggctgggataattgataaagcaaaaacggccagaaaaatactgcgccctattttagacccggacttggtacgctggctggaacagaacaatatgggcgcttatgtcaaggcgcttgcgggggtaagataatggatttaacagaacgactggacgcgatggaagcggcgatccgaaagccatccttccgtcagagcagcggaaaagccaatgaggtcaactactggatttttgactatccgcctgagaaagagctggaagtccgtgagcgtatcgaatatatgaagcataagaactcgaaaggaacggacggatttgagcttgttgtgttcgacctctatgatattattattgacttccttgaagggaagaacttcatagagaagtgctgtgaatttgagaagaagcgcggcatccaaagaattgtcaaggcagtcagcaattcgatgaaagtaagcgaggacgacagcctgattgtgcagtacattcttgaccacaccccggagaacgccattgtctttctgaccggtgttggcaagagctatccacttcttcgttcgcataatgtgctgaacaatctccaccagtcctatctacacgcacctgtggtgatgttctttcccggcacatacaacgaacaggaattgattctcttcaacgaaatcaaagacgataattattacagagccttccggcttgtcaagtgatggaggtgcagcaatgaaaataaaggatatgttcgccaagaagatcgaccgagaaattcaaggcgtaattattgtcggacaaggcgaggacgcaaatgtatctcaggagcttgaggaatatgtcgttacccgcgagcttcaaaagcattttgccgatttctattcggcctataaaaaagggattgtcggaacaacgccaaagatgggcgtatggatttccggcttctttggaagcggtaaatcgcacttcctgaaaatcctgtcctaccttctggaaaaccgtcaggtcggggacagaaaggcgatggattactttgttgaagataagaagatcgtagatccgatggtgttggcggatatgaagctggcggctgatacccccacggatgtaatcctcttcaacatcgactccaagagtgaaacgaatggcaagcaaaacaaggatgccatcgtcaatgtattcctcaaagtcttcaatcaaatgcagggcttctgcgggtccatcccccatgttgccgatctggaacggaggctttccgaggaaggacgctacgatgagttcaaggctgctttcgaggaagaatacggcgatccgtgggaagaatcccgacaggacttcgacttcatccaagacagcgttgttgatgcccttgtctcaatggattttatgagcgaagctgcggcgagaaactggtgtgagaaagcggtggagccatataccatcagcattgaagacttcgccaagcgcgtcaagagctatatcgagcgcaaggggaacaaccaccatgttgtatttctggtggacgaaattggtcagtacatcggtgatgactccaagttgatgctcaatctccaaactgtgactgaggaactgggcaaggagtgcatgggcaaggcatgggtcatcgtgaccagccagcaggatattgactccatcaccaaggtcaagggcaatgacttttctaaaattcaaggccggtttgatacccgtctctccctctcttctgcaaatgtggatgctgttatcaagaagagaatccttgagaaaacggaaccggctgcgcaaacgctccggctgctctatgagcagaaagcaacgattatcaagaacctgattgtgttcaatgacacggcagaaaagaagctgtacgcgagcgcggaagactttgccgaggtctatccctttgtgccgtaccagttcaatttgctgtccagcgtattgacttctattcgtacccacggggcttccggtaaacacctttccggcggtgagcgctccatgctggcgctttttaaggaatccgccgtcaatgtcatgaatgaagaggcaggggtcattgtacccttccatcgcttttatgacgcactggaaaactttctggatcacagccacagcggggtgatcatccgggcttatgacaacagctatatcaacccggagaagaaggacaaggatgtcttcgccatcaatgtcctcaagacactcttcatgatcaaatatgtgctggaaattgaggcaaacatcgacaacatcaccagcctgatgattgaaaatatcgacgatgaccggattgagctgaaaggccgtgtggaggaagcgctgaaggtcctgatgcggcagatgctcgtgcaaaaaaacggcagcatctatgtcttcctgaccgatgaggaacaggaagtcaacaatgaaattgagaaggaaaatgtagaaacgccggagatcatcaccaaggtcgcggaaatgatttttgaggacattttccccggcaaacgctacacctatcctgtcttcaatggccgctatgcctttggcttcaaccagtttgtagatgatcgtccatacaaagcaaatcaaaactatgacatcggccttcgtgtcctgacaccgtggtacgacggcagcacagaggatggaacccttcggatgatgtccggtcaaagcagagaagtccttgttgtacttccgaatgatgcagagttcctgacggaaattcaatcctatttgaaaattgaggggttccttcggaaaaacacctccacgcagcttgccaagtatgagacgatcaaagaggcaaagcgtgtggaaatgcgggagcgcaatcaaaacgcaaagctctacttgaccgaagcgctgaaagaagcaacgatctatgtaaacggcgatgttgtccgcgtgaacggcaaggaagtcatcagccggatcaatgaagccattggccgtttggtgcagacggtctatcacaagctgtcctacatcgacgcgccgatgggcgaggcggagatccgcaagatgctccatcagagcaaccagctttctcttgggctggaaggtggcacagagagcaatgctcatgcgctggacgatgtgcagggctttatcgccatgaatacccgcaatcacatgaaaacctccatgaaaacggtgaaggaccgcttcatgaaggctccttatggctttgtggaagatgatgtgcattggctggtggcgcgtctgttcaagcgcggagatctcgctttcacagtcaatggtgctgcggtcagcctgaataacaagagcgaggaagagatcatcggcttcatcaccaaaaaagcgtttgcggaaaagctcctgatggaagagcgtgtccgcgtcagcgataaggacaaaaaggctgtccgggatgtgatgaaggagaccttccgcgccactacttcggcggaggacgaagatgccatcatgaagaacttccagcgctatgcgcaaaacacgatttatgagatcgagcgtctggaagtccattacgagcagcatcattatccgggcaagcgtgttctgtccggtgggaaggctctgatgcagtctgttgttcagattcagtctgctttggacttctttacgaccgtttccaagaaacgggatgacttcttcgacttcgcggaagattacgagccgatcaagaccttctttagcggcgaacaatctaccatcttcgctcgtgcgctggatatgcttgcaatctatgatgacagcaagacctatatcgtcaacgccgagttggaagatatagtcgcacagatgcgctctattacccggcaggaaaagccctatgccaacattccgaagctgcctgagctgcgtgagcggttcatgtcctgctatggcgaaatcttgcagcaggagtccgcccctgttctcgattcgattgatcaggcgtggaagcgcgttttagaggtactttccaccaaggactacaacgaccagaagcggacggcttactatgagaagttccaggaaatccgggatggagctacccactgcaacaatgtctctacgctgagaagcttcgcagataaagcagatgcactgaaacgacggcttcttgatgaaatggctgatcttgactacaagcgggaaattcaaaaggccgaagaagaagcccgccgtcaggcagaggaagccaaacagagcggaaatcctgctcccgaagcaaccgttgcccctgcgccagtgaaaatccgcaagacgaaaaatgtctccatcaagatgatgacgggaacggcttcttggcgtctggaaagcaaagaggacattgaccgctacatggacagccttcgcaagtcgctggaagcgcaactggacgaagatacgattgtcaatgtggagttttaatgggcagtattggaggtgcgtatgggaaatatcacgctgagttttactgttcaaggtgacagcgaaggatatgtcacctttgaatgcccgtattgcggatcagaatttaagctgcaagcaggagaagtccaaagtgatgaagaacctgttttggaactgttctgcccctactgcggacttgcaaaagagaaatccgcattctggtcaaaagatgttcgtgacaaagctcgagcgttggccgagaactatatgattgaagagttgaataaagcctttgggaaaatggctcgttcgatcaatcgtcaaaagagcataataaaaatgacatataaaccgttgaaaaaagtgtatgtcaaagagttaaaaaatgcggacacagcggaaacggagttccaatgcacttgttgcaatcgaagggttaaagcgttgtactgcgccggagcttcaaagatattttgtccttactgcggggtagacttatgagtgaatacagagaattaagaactatcagcctcgattttcgaagaatatccagcaatcttctttcaagtgacgatggagatgcagatgtgaatctccatcggctgatggattatattgagaagacgccatttatccatgaccgtgttcatagcgttgtggatcaagtcgaatatgattttcaggcttgttttccgactcattcctctgaatgggcaagcacgagcattccagtagatgaaaattgtcacatcaaagcaatttatgactacatgaggtacatcgtggagaccccaaacacgaatgttttaggacaagccatgcaatacctatggaaaaagggcgcaacttacacggatattattcagcgttttttggaaaacacagtaaaacccttgataaatttcatcaacgatgaaatttccaaggagatgatccttctggaagatgagaagaagactgcaccaatgactcaaaacatcgggacggtcaatggtccggttatccagcaaggcagcggttctattacactcaacacgaaaaacggcgtatcagcaacggacttaaactcgctcatcgaaaagctgatttcgtcacttcccgctattactgatactgccgccgaagagattgaaagcgttaaggatgacttggaatccttgcaagaacaaatctattctcctgccccgaaaaagagccggatgcaaaaggctttggcaggaataaagaaattttccagtgaggttttatctaaagcatctgtttcaatagcaacaagtgccatcaccggagcagactggacaacattgattcagcaagccgaaatgttcatcgacggcttaatgcaatagggagaatcgccatgaacaaaacagccataaaaaactttgcaatctgggcgcggaataagctcattgcggatattcagtaccgcgccggattgatggggatcacagcggacggtatcaaagacccactgccgcagtctaccggaacgatggagttctacgacatcgggacatctgagccgtatgccatcagcggcgatgcgatcccgcagcgcaagaagctggtggaggtgatccgcaagaaagaaaacgacagcagctacgccacggcctacaagtacatcttggaagaggttgcctacacttggttcaaccggctgatcgccatccgtttcatggaggtcaacgactatctgccttcccgcatccgcgtcctgtcctccgagagcggcaaaatcgaaccggatttggtgacaacgcccttcgacgcggagctggccttcacccacgctgaggaagagaccgtcctgcgcctgaaaaccgagaataagctggacgagctgttccggctactgttcgtcaagcagtgcaacgccctgaatgaaatcctgcccgcactgtttgagaagaccagcgactacaccgagctgctgctgaacctctctgtggtggatcaggaaggtgtcgtgtaccatctgacccacgacatcccggaacaggactttgacatcacccacctcgatgaggacggaaatccgactggtcaggtagagatcatcggctggctgtaccagtattacaacaccgagccgaaaaacgccgcctttgccaaaaacggcaaaatcaccaaagaggaaatccccgccgtcacccagctcttcacgccggactggatcgtccgctatatggtcgaaaacagccttggccgcatcttcatcgacaagcggaaagaacagggcgtttatgctgacggtcgtggcttggaggaaatgagctgggatgaggttgaggcaaagcgcatttccaatgaagaagaaatcgccggtcagatgggctggaagtattatctgccggaagctgcgcagaccaaggaagtgcgccagcagctcgacgaaatccagaagcagagcgaatacaaggatgtccgagacatcaaggtcattgacccctgcatgggcagcggccatatcttggtgtacgctttcgatgtgctgatgcagatgtacgaaaacgacgggtacagccagcgggacgcggcacagtgcatcctcgagcacaacctgttcgggctggacattgacgaacgggcggcacagctcgcctattttgccgtgatgatgaaagctcgtcagtatgaccggcgaatcttctctcgcggcatccagccccatgtctatgcgattgctgagagcaacgacattgactcattcacacgggaatacttcacgaacaatgaccaaaagcttaaaacagctttggccagcatcatgagcgacctacgggacgcgaaggaatatggctccatcctgacggttgccccggtggattttgctgcgctgtatgcccgtatggacgaagtgcaaaacgacatcagcttccaccgggaaggtgccctgaacaccattctgccactgatccgtgtggcggaagtcatggcacagaagtatgatgttgtggtcacgaatcccccttatatcggggggcgtaatatgaacaagaaactgcttgataaaatctgtacagaatatccagaggggaaagcagatctatttgctgcatttatttctaagaccttggaaatgacacagcctttccgttttacggcaatgattacacagcactcatggatgtttctttcaagttttgaagatttgagacaacatttattgggggtaaatttatttaatatgtgtcacttgggctctcgtgcgttcgaggaaataagcggcgaggttgtacagacgacaacttgggttacacaaaggaacaaaacaccggaatataaaagcgcttttgtgagacttgttaattttgacagtcaagcgagtaaagaaattggccttttgcataaagaagctcctatatttcatattcctaccgaacagtttggagacatcccaggtgaagcttttgcatattggcttgccaacccaaaagtatttacgcaaggaagactgttagaggaggttgccaatccgaggcaaggacttaaaacattagataacgactattttattcacttttggcatgaagtgaactggaattcattgtgttttggtgcgaaaaatgcagaagatgcacagcactccaattgtaagtggttcccaatcaaccacggcggtgaatatcgcaagtattacggaaataattattcggttgttaattggtataatgatggcgcagagatgaaggcaaatgctatcagaaaatacaactcggtaacgagaacaatcactaatataccttactattttagagaaggcatcacttggagtgtgatttgctcacaaccatcattccggtggtatggttatggctttatttttagtaatggcggccagtgcgttgtgccagatcaacctttgaatttgaaatatttagctggattgcttaattcaaaagtgacaggttacttactcaacattctttcccccaccctcggatttgaatcgggctatttgaagaagattccaattatcgaagataataattcaagaatcgttgttgaggaaaacgctgataagaatatagcatatagtaaaatagactgggactcctacgaaacttcttgggatttccaacgccatccgcttttacgctcagtcactcgacttgaagaagcctacaccacatggagatccgagtgcgagcagcgcttttcgcagctcaaagctaatgaggaagaactgaaccgcatcttcattgacatttacggcttgcaggacgagctgacccccgaggtggccgacaaggatgtcaccgtccaccgtatctttgacaccaaggatgatgtgctggcatccatgcagggcagtagctatgtccgcaccaagcgggacgaggttgtttctttgctctcctacgctgtgggctgtatgtttgggcggtactcgctggacagacaggggcttgtttttgccggaggcaattttgattctgtatattggaaattcaaaggacaagctgctcttaatgaacagggcgatccgattgacggcggatatgctggaatatcactggcgaattatcactaccccaaattccatgattcagaaaaatgggaagatgcaacttcgctttcctatgagccggatgctgatggtattatccccatcaccgacgaagagtacatggaagacgatattgtctcccgcctgtgtgattggctgaaagctgtctatggcgcggacacgctggaagaaaatctggacttcatcgccggggcgctgggcggtaagggcaacagcagccgggagatcatccgcagctatttcctcaaggatttgtttagcaagcatctgcagcgatgcgccgtttcgataattttcaaaaattgactgcacagcagaagattccagtatgtccggtataatatttccttcattcatctgatatccaaaaggcaagtatctttttttcttcatgattaacctccgcttatcctttcttcttccaactccaatccattgacaagttgaaatctcaatgtttcatgtgtcactgtaatacggctcactatatttcggaacactgatgagctaaaaaccggcatcggggagtctaatatcgttaaaatcaggcgggtgttatcaataaaatccgcatactcgtttaaatcacgatattgtttaagttcggcttttaaattggatatcttttggctcaattcattggattgtgctataaaaaaagcagaatcaatgcactcttttgcccgcaagcggtgtagagtgtgattctgctctaataatccagcaatctgtctatttaattccatggcatcaggatgggccataaaatccttatcttttagttcttcaagctggcggagatagcttccaaggatttcttgacgattttcagccagctttttatataaagtaaggaagcactgctgtatttcagtttcatttaggctctccatgctgcacagatgtttccctttaaaatgcttgcgacaggtccacaaaacacgttggtttttcgcaattcgtctacagaaatttgtcccgcactcatcacagacgattaaacttgtaaaagtatactgtccattattttgatgtccatgtcgctctgatttccgttttaataattcttgtgcttttcggaatacctctctgctgataattggatcgtgggtatcttcggcgtaatactgctttttctgtccacgatttatctttttttgaaaaggcagagtatctgttgtgtatcgtttttgaaacagttcatcgcctatgtatcgttcgtttgtaaggatatagagaatacctgtataactccaaatgggttctccatttaactttggaatatgttctttttgcagttctgcagcgatttcctgtattcccattccggagaggaagttgccaaatattctttgaacaattttagattcttcctgttgtacaatgagtatccctttctcatccagatagtatccataaggcgcttgtgacaatcgaaatgttccgtttttcattcgcatgactgcgccttttcgcatattcttcgatatggaaatggattcttcctgcgcaaatgcactcatcatgcttagaaacatttcattgctcatgtttgcggtattgatatgttctttttcaaaataaaccgtaactcccagctggcgaagctctctcacagcttcaatgcagtcctgagcgttacgtgcaaatctggaaaccgatttgaccagaattcgatcaatttttccttgtcggcaatcacgcataagacggagaaactcatcgcgcttcagcgcacttgttcctgttattccttgatccgcatatatgtcaacaaaggtccagccctcatgtgcttgaatgtactttgtataatagttgacctgcgaagcaaaggaattgcgttgatcagtggaatcactgctaacacgggcataggcacatactcgaagcttttcggctggtgcaaaaattattggttcaatcactcgaatttctggcatttctatgccccctttcctgcagtagtgtcatgtgacagtaacgtcggtcacctttggcaaggacaacactaccacaagaaagaggataaagctatcacaacaaccactaaatatagtattctaaaacaccgtacttttcggcaatagcaacattggctttgtcgcagttttctttggtgataagtcctttcaaaaaaagtttttttaaagcggagaaggccatataatacttgatttcgttgatgaggacagcggaaggttcttgaggattgtatgtagtgttcatgatataccccctttaccacggcagagggagactctttcgagctgctctttgaaaaaagcgattttccagcccttttagatagagttcataccgaagatcgctgtcagtggtaattagtaccgtatcgtggtcctgcaaaaattccagtatttgaattaggacggcgggatcgtggctcaggcgggttaaatcccgaacaagcacagcacggacatgaccttctttcacagagcgcatcatttgttgtaatcccatccgagccatgcttctgccagtccccatatcctgtgaagtgcctacaaccgtgtaactgcggcgctgggcttcctccaacaactcgtgcatctgctgcatgagagccaatattttcttatcgctgcttcggctgtataaccacataggacggtctatataaggatattccttttctggttccgttttctcattcatctatatcaatctccttattggtaaaaatgcaatgcaactgctctcatctgtcccagccttttttcatgtgttgttgctgctgtttcagaaggttttcatactcggcatatcccttatcatccagttctttcaggcgttctggatgaaagcgatattctggataaactacaaatccgctttgctcatttcggcctgtgggagaacccagtccgtttttctctatccatgaaagaatgtcattactcaaattgttgacgtcaataaaagcacagtcctttgcaatggattttcccaaatttacgctcagatctccccatggctgcggatcgccttgactccaatccactaacagcagagccaaatttccgccgctgtaataagagcgcacttgtagttccaaggatgttttttctcccatccaagacatttccaaaagagcctttccgctgagaatatcctgatatttcttatcgctgtatccttcccagcgcaaatagttccagtccggcttgggacatttttcggcaagggctatttctttggggacggtttttaatttcggaacaggaatgtcacccatctgaaccttggcataaatgggaaggagcttttgcaataaatatgcctgatcagggcaagtgtcaataagtcccattcttgcagttaaaaaagatcggtcgtccacagttccaatggcagacatttgtgcccattggtgctgcattaaaaatgctgtgatattttcgggagtcgcttcaaaaaagacagcttcgtttggactttccatattgctggaaagtccctgtaaatatttttgattcataggaggttctcctttacggcataaaataatccgggcttttcttggtccggatgaaatcttctacatcttcgatttttctggcgatatgaagtggtggcagggtttccagcacagctcggtgatatcgttcttcgggtgctgcacgatggtccagaatgctcaccacacaggtatctgtttcagtacggatagcccgtccaaacccttgccggagttttacctgcatatctgggatgatgacttctcggatatagtcctgcagggtgggatactgctcccgttccgcttcgctgataggatcaggaacaggaaaaggcaggcgtacaatgatgagcgacgataccatatcgccgggaaagtccacaccttcccaacaggaacccgctgcgaacagcaccgcattctgcgtctgcttgaactgatggataatatcctgcgaatgccgccataccaccattagcggaaaggacagatgctcttttacttggttataaacagcgcccatcagggagtaggaagtaaacagcaccagagtgtggccatgagtggtttccactaagcggcagatctgctctgacagacacttggcttctttttcgctgcccatttgcgcctttggcatatcatcgggaatgtagagaaggcagttttcttgataatcaaaaggagaaaccgcaataaaatcatccagccgattgtttgcggacagccccatgagttggcgggttctgtcaaagctgcccccggccataagggtaccggatgtcagaatcgctggtgtttccttcgaccacagtgcgtggcgcagctgttccggcatttcccgggtggcggcgcacaggctggggcttccatccctgtcatactgaatataaagaatgtatttacggtcgccggtaaaaaacaggttgagagtttgctctgttgttcccagctggtaaagtatccaccgtgggaggtgaagtgctagctgtttttggatctgccgaagaagggagagacaatcccgaagggcagcttcccgatccggcgttaaaacaaaggcagtacgctgtgcttcttctagcagttcgccccggcacatggctcccataagagcagtaaacttttctttcagccgctgggctgcgagggcatatttttcttttgccagcagagtgcagagctcgctgaaatcttctgctgaaaggcttttcccatacatctgccgagctgcgtccggcagtttgtgagcttcatcgattaccaaagcccgatagtcattcagaagaggacgaagttcctgcaaacgatgggcggcgtctgccaacaagtaattgtgattacagatctggacgaaaatctccgcgcttctggcttccttcaggtattgatgataccggcaggcgcttcgcaaagggcaagttttctcgcaaactttggggacgcacacctgccgacggtcaaatccactaaggccggttacggagtccaaatcataataagtacgaagggaaagcaatgctttgagctgttttgcattcttattcttatctttgaccgcttccaatctttgagaaagccgggcgtcacagacaaaacgctcttttccttttcttacgattgcccggatgggtttggagataacacggttctccagaaaaatccgggataaaaacggaatgtattcttcgatgatagagtcctgtaaggcaacgctggaggtagaaatcaccaccggctgagaacctgcaggtccatgcggggcaaactttttcagtaaaatgcaggcggtcaggtaagcataggttttgccgatcccaacgcctgcgtcgcacagagcgatattgtttttgagcagggtatccagcatggcgtgacagagggtgatttgttcttcccgaaccgacaaaccattttgaggcaaaagaattctgaaaatcttttcaatctctccgtgggcctgctctttcaaagtaggcttattcatttcggcacattctcctttgagcagtttgctcgtatgtgttggcggcaaactaatgcggcgcagcttttaaactgcgccgcacggattcgccgtcaacggcaatctgaaaaattaaaaggtttgattttgatgtgccgtatttgctgctcgccccccggcaaccttgggaaccatacgggcaggcttgcagtttacaaaccgttcactggctccccaaaggtcttgctgattacaacccaaggtcgaccaacccatctgacgtgtgggcaaacgataatgcgtatcataataccccgcccaaggtcgtggcgaaaagggaaactacaccctcttttcggtcaaaatgcatcgctcaaaaccaacaactggggccaccgtcccacgaataaatgggaggcggtttgtgtgcggctcgtcatggcgctttttcctgcgtcgctcacttaggcgggaatgtacccgcatggctggtattcacttttcaagctacaaggcgaacgtttctttttccccgttcgccccatagcccatgaaaagaggcggaatataacgcaggtcataaatatttttttattttttttcgtaggcggtaaattcgcatatttacagcgtactcatccattccaaaagcagacgctatttctttgctgctatatccatccattttcataaagagaatttcgagggtaagcttgtccacagtatgtaacaaagaaaaaagttccatgtcctcgatactatccagcaaggattcggtatcctcaacgggtagttccagatcctgtgctgaaacccaatccacatagggagaccaatccacctgtcgctgcagatactggcgttccttattaaactgagcccaatcgtatgtatgcaggcgttggatggtttcctcatccacaccgagttctctgagtttcttttcttctacttctttccagcggagccattctttttccgctttggctttgttgtaagccatcgttatttcctccgatcaatctgaaattttttaaattcagattgtcgggggcggcgctctgccgctgtgaattctcagccagaacctactcaatggaaaataaaaaaagcgcaattgtccgtagacaaaagcgcttactgcacataaattatatatacccgatatctctaaatgaaacacggtacaactcccctaattggaggagttgtattttgctttcctttcttaacctccttcaggataagtcatttcatatgttagcgattaccattggtttgtttaatggtctttacccggaaaacaaagtaaaggatatggaatacccaaacacaagccagaacgatccttcccaccggaacagcatgcatcataataaagccgatcgacattagaaccgtcacggtaatcataatccggattttggtcttccacgtcatgccctgtccttttacatagctttccagattgtttttatacagctttgttcccgtaaaccaacggtgcagtttttcagagcttttggcaaagcaaaacgccgccaaaagcaaaaacggaaacgccggaagaagcggcaatacagcccccacggctccgagagccaaaccgatacagcctaaaatcacatataaaagcttctttattttcaccttgattcctccagtcgttttttctcttttttcgattcgatcacatgggaaaccgccatcacaggatgggaaaacagcattctgggcccggaaaaacgcatgacttcccggattttctcccgcatgaccggtttgtagcaatgtaccttacagttggaacagaaggttttcgtctccataaacggacacttgtcgcttctcatcctggcataggcttccagatctgcacattcgggacaaagtccgcctttggtgtggtgttttttgcggcagtacagggcaatcatttccgataccatccgcttttcccgttcccgcttatcggctgtacttttcatcagctcatcctcccgtgttccaccgaatagacggtatcagcgatgcgcatggtagactgccggtgggaaaccagcaccacggttttgcccgcccgttcttcccgcagggattttaagatcaccgcttcgtttaagctgtccagattgctggttggttcatccaacagcaggaagggtgcgtcgtgtaaaaatgctcttgcgagccccagacgttgccgttcgccgccggaaagagtatcgccgagttcgcccaccggcgtgtcgtagcctttgggaagggtcataataaaatcgtgaacggaggcctttttgcaggcggtttcaatctcttcgtcggtggcggtcagcttggcgatccgcaggttgtttttgatgctgtcgtggaagagctgggtctcctgcgtcacaaagctctccagatcgcgcagatttttggtgttgatctcttccaccgatcggccagaaagctccacgctgccttcctgcaccttccagaaccgcatcagaagctttaacagggtggattttccgcttccgcttctgcccacaattcctactaccgcattttccggaattgtcaccgatacatccgaaagaatggtttcattcccgtaagagaaggaaacctgctccgcttttgcgccggagaatgtgatttccggtttcccggtgatttcctctactaccggcgtttcgtccagaatatccagtactcgattgcctgccgcaaaggtgttctgcagggtgctgcccaacgccgccagagcaatcacgggaccaaaggaagaaaacagcgccagcgtagggatcaaaacgccgtcaaaatccactgcgccgctttggtacagcaaggccgaagcaaatagcatgataagatcaaatgttaacaccaccgtattggtaaccgctgtatttcgcccggcagtgcgtttcatcttttcttcgtctcgggagagttcatccgtcttttcattcattttggaaaggcgcttttttccctgtccatactggaggatttcggaaagcccccgcaggctgtccagcacaaagcccgaaagctcaccggatctggtgcggaaacgcagtccgtcatccccgctgcatctggatatcacaattggaatcacgattcccacgatcagataggccgccagcgcaatcacgcccaggatccagtgaaacgagccgatgaacaggcacatgacaatggtaaacaacagcgcgatggcagccggtgagatggtgtgagcataaaacacctccagcagttcaatatcggaggtgatcaccgagatcagatcccccttgtcccggccttccagctttgccgggcagagctttctcagtgcgcggaacacccggtcgcgcaaaagtgccagtaatttaaatgcgataaagtggttgcacgcctgctccgcataccgcaaaaatccccggagaagggcgaagacaagaacggaaataaaaaccgttgtcagagtaaaaggtacttcaaaccgaagggctgccagcacaccgtatccgccgaaaatggtgataaaggcggcgcacaaatgcccgacgagccccatcaaaacagccagtgacatatagccgctcagaggttttaccagcccgatcagccgtgccatcacagcaaatccgcttcgctttttcatacgcttgcacgctcctttccaaattgctctaatgtctgctgggcactccacagccgttcatacaggccgtggtgggcaagtaattcctcatgtgaaccgctttccgcaacgattccgtgatccagcacataaatatggtcggcgcccactacattggcaagccggtgggaaacgaggattaccgttttgctttttgccagttcatgaatttcacgcataatatcgttttcgctctccacatcgatgttggaggtggcttcatcaaaaatatagacagggctgtcatgcaaaagcgcccttgcaagcgccagccgctggcactgcccgcccgaaagattggacgctttttccaaaagccgggtatccagcccctgttccgcttttaaaaattctgcgaggtttacccgggaaagcactgcccacagttcttcatcggaagcgccgggttttcccataagcaggttctcccgcaccgtgcccttgaacaggtagctttggtggctgatataggtgatgtttcgcagaaggctttcttcctgaatggaggaaaggggcacgccgcccaccgaaacgcttccggtatatcctttgtttcttcccatcaggatcgaagccagtgtggatttaccgcagccgctttctcccaccagcgccgtaaagctgccctgcgggaaggtaagatcaacgctatggaggatctcccggtccggctcataggagaaggagagaccggaacagcggatggtgtgtcccgaaggaaagctttcggtgatttccggcttggtttcttctaaatccagcagtcggaaaatcttgtcgctggccgccatgccgttcatggcaatatggaaaaaggaacccagctgccgcatgggaataaagaaatccgccgccagcaggataatcagcagacatccctcaagagaaactcctccgctctggtactgggtcaccgccatgatgacgcccagtgccgcaccgccgtacgcgatcaggtccataatggtgatggagtttaactgcatggtcagcaccttcatggtgatctttcggaatttttccgcctgctcgttcatttcctgctgtttaaacgcatccgcctgatagattttgagagtggtgagcccctgcaaattttcaaggaaagtgtcgcccaattccgtatactgtccccagtatttagagagcagttttttggcccaggtctgcaccgccgcaatggctacagggatcagcggcacgcagataagcagcactaccgccgccgcgacattcacaaaacacagtacgataaacagtgtgagcggcgccagcatggcatagaaaaactgcggcagatacgcgccgaaataggtttccagctgatcgacgccttccaccgccacctgcaccacttccgaagttttcacctgttcgttgtaggagcttcccaaccgcaaaagcttttgatagatcttctcacgcaaagactttttgactgctttggaggagaagtaccccattttggcggccccgatggagcagaaaaaccggactgccaacgccaaaattacaacgattcccgtcactgtgaaaagctgcaccgaggccgaacccctgaaaagctctgcaagcattcgggaaatactgagcatcagggcaatgttcgccgtaagggagcaccactgtagaattacatttcccgctatgtattttttgctctcggcaacggtaccgatgagccgtttattgatcatcatattttcgtccgccttttgttatttttttcatcactttcttaacgcctgtacacagagcggcaaccgctatcacaagcagcactgatgtaaaaccgtaaaaaagggattgcattgcattattcacagccgcttgccttctttctgtttgtccaccttctcagcgcctcataacttttcggacttacggcatgttccatttggcaggcatcctccgccgcagttttcccatccacgcccaggtcttctaaaagggactggaaggtctggtggcgctcataagtttctctggcaacggtttgccccttatctgtcagatgcacttcccgcgcaccgtctaagaaaagatagccttctttttccaactctttcagcgaaacggaaactgtgggacgcgacacatgaagctctgctgcaatatccgcaccacgtacggagccgttttgcttttgcagcaaatacacggctttcagataatcctccaccgtttttctttgtttcatacggcttatgcctcctttccatgtattcagggttatcccttataccgggataacaaaaggttttccatctaccgactgaatggtcagatcaacgccgtatacctcttggacaagttcctttgtaatgatttcctccggtaaaccgtgagcaatcatcctgccatctttcatggcgacaatttcgtcactgtaatacagcgactggttgatatcatggagaaccataacgatggtaataccgtactcccggttcagcttctgaatgagttttaaaatctgcagttgataacggacatccagataggtggtcggttcatcgagaaacagtaccttggtgtcctgtgccagcgccatggcaatccacacccgctgtttctgtccgccggaaagctctgttaccggtttatccttgtgcttgcttgtatgggtgatctccagcgcccactgtattttttcttcatctttttgcggatccgatgaaagccccatggtatgatagggagttcgcccgtagctcacaagcttttcgaccgtaagatccggcggcgccgtattgtattgatggacaatcgccgcttctctggcaaaatcttttaaacgcaaatttgcgatattttcctctctcagaaacacttccccctgatcgggctttaagtttttcgtcatcaggttaaacaatgtggattttccgcatccgtttgcaccgatcaatgtggtaattctcccctcgtgaagagaaaagtccaatccgttcagcacctgctgctttccgtaggaaaaggaaagattttttacggtaaaaatattactggccatagtttagtcacgcccaaactcatgaccatcatgattgccagcagcacagccaaacttcgcttaaaccatgactgttttgttgttgtcattgtgtctacctccattcatttataaaaacaatgtttcggttagcataatctaaccgcttggtgaaaaataatgccgtttctacggcataataaaaaatatcgcgcaccaatcctccttttgcgatgttctggtcaggagaacaagttaacacgcttgtttccctgatataaacgggcagaggcaaaaggttatccgtctgagttaggttatgctaactaatcccctaaaaaattgctcctttcggagtttttaagagggggatcgttgttgtcatattgcttttgactctgctctcctgttactcttctgtccggtctcaaagaccaaacagggctgcgaatgataaaatatactgcttttataatccgcattttccttaaagcaaattcagtatagccagttaccattttgttgtcaatggattttctgttgcaaaactgctccaaacagcctgttgaagggttaaaaaagcgtctaaaccccgatcatgactgataaaccagcattgttgcaaaactgctccaaaaaatttttcatttcttctgaatccgcctgttttaatggatgaacatggtgaaaacagctgtactctccggcatatgcatatccccaacactgcattgcattttcaggcatacgcttccatacagcagggtatcccggccttttcccatagagataaaccgcagtgccgttaccggaaaaaatacataacgcccgtcaatgccgccgtcacggaattctccgtcatataagtattgcagcttctggatgcgtccttccattttatttttactggacatagactgagcggatacggtttttgccgccagatacacaagtccttcatgatcctttacgatgacttcacacggattttcaaaaccacggtttgccatggaaaggttattgtgatttttgatttgttcccggtaaataatgaacggaaaatagtaactgccatcactgaggtaattacaaatatccccgccatggaagtctcggcgtccggcaaatatttctttgatatgcatccggctttcctgttcagccagccgatccataaattcatcagaaaaccttgctgccaatgctcgaagggcattctccttaatctgtgcaggagggatatcctgatactgcatatatttttctaatacctttctctgtttctgatacttttctgccagtttaactcccggaaccgtcaaaaccgttttgcgattctccagacgttctacaatattcagcttttccagcgtatccagcgtacgagtgaccacccatttactcacattcaggcttctggctgaatccgttaccgtacgctttgacggttccgccgtcaggtaataaagcagcagctgaatttgaaacggcgttaagttttctttttccaacattaaaattccctccgctattgtattcgtataaagtgaaaacactataaattcaaacaaatcatcttcaccatacagaaccggtcagaaacagccatactgaccttggtggatagttttaagccgtttttgggaatataacggtagtaaggctcttctgtcatatccataagtccaccgccaatctttccagctaaattcactgctgaatccacataaaagaacatctgcacatcggcgtggccgacctgcttcatgtatttcttttgcatcatagccatgccttttttattcacagtatcaaagacgacttctatttctccgaattgtctgagcatacgaaacagggaaataaccttatcttcctcaaaatagtgaaacagtccgcctgctgtaacaaggataggggcgtcgggcaaatccgtgcgaacttgtctgatccaattctctgtaaaagcatctccagcaagataggtctcacgctccgactgcgggagcagttccttccggtagtcaatgacgtgtggcaaatcaacggcataccagcgggtccttccgttatcgcagcggtaataggtcgtctccagaccgcagccgagctggacaatcacaccgtccggtctgcgctttaaaaacgaccggatgaaacggtccatattagcagaccgcaccgctgaagccagcagggtatactggctctgactgccgttttcctgcaggtcggacggcagcttttcttttaattccaaagcctttttatcatatatgatctgcgggcaatgctcgctggcataaatcctgcccagcatggggacaaaaagtgtgtcctccacaacgcctaaatgtgacattctgtgtcctcctttttcgaacagctttgtatcagcccaacgccacatccaataccatcatcaaagtgaaaccgactgcaaacagaatggttcccacattggagtgctttccggccgacatctccggaatcaattcctctaccaccacataaatcattgcaccagcggcaaagctcagagcatagggcagtaccgggactaaaattcctgccagaaggatggtcaggagcgcacctatcggttctaccgcaccggacagcgttccatacagaaatgagcgggatttggagaaaccctccgctttcaggggcatggatataatagcgccttcagggaagttctgaatggcgatacccagagaaagagccagcgcccccgccagcgtgatcccactgtccccgtagagccacccggcatagactgcgcccactgccatcccttccggaatattgtgcagtgctactgccagagtcagcatagttgtttttccaagactgcttttgacgccttcagcctctgagctgccacgatgcagatgcgggatcagccgatccaatcccagtaagaataaaataccaagccagaatccagctacagcagggaagaaggaccattgccccatgtctgatgcctgttccatggcaggaagcagcagactccatatggaagccgccaccataacccctgccgcaaagccggtaagcgcacgctgaaccagttcactcaaattgttccgcataaaaaagacgcaggctgcgccgagcgtcgtcccggcaaaaggaatcagcagcccctgccataattcaaaaggcatgtcttttcaccctcatctattttcttttaaacagggaaaacccttgtctttcataaggttcacaacgaatatccaacaccttatacccgaattcttccacagcatgtttcagtaactgtgtgtcaacggcgtcttgtataagcagttccgtgatcccttttctgtgagaagaagtcactttcttaacagaaaatacttttctgatcgcatcgtttatatgagcctcacacattccacaggacattccatcgattttcattgttacttttagcattcttctatccccatgcggttagcaccggctaaccaaaataaaataaaaatagttagctaactctaactgattgattttaccataccatacatcattttgtcaagatactgtactaaagtgtttccagatatagacaaagccacactcaaaaatagtaatgttttgcgtgcggcatttgcctaacatctggtttatgcccgcaacagaaaatcacactatgccagcgtccagttctggctttctgtctgtaattttaccatgcgggtatagataccgtcttgctggagcagggtatccggatcgccctcttccgccaccataccatcggaaagcacgacgattttatccgcaccggctaccgtgcgcatccggtgtgcgatcaccagaacagttttgtctttgatcagccgtgacagagctgtctgtatcagcgtttcattctccacatccagagaggctgtagcttcgtcaagaaggatgatcggcgcgttctttaagaaggcacgggcaatggaaatccgctggcgttctccgccggagagctcacaaccgttttcgcctatgttagtattccatttatcaggaagcttctcggcaaattcatccacattggcaagccgtgccgcagccagaacctcctcatctgtggcgtctttgttaccgatacggatattttccagtatggtgttgtcaaacagggtaacatcctgaaacacaatggaataaagagaaagcagcgtttccggatccacttttgagacatccataccgcctaccgtaatttttccccggctcacatcccaaaaccgggctgccagacgggacactgttgttttaccgccgccggagggacccaccagtgcggtcacttccccctgtttggcagtaaagctgacatcctttaatactgtttctccggtgttgtaggcaaacccaacatggtcaaaggtaatgtcatacccctgattggaaaggctggttttgccctgctgaatgggatggtcaaggatttcattcatacgggcgatatttgtccgggtggaaattaccgccgccagattctgcagcgcaccctgcaagggatcatagagccgggaaaccaccagcaggaacaggaagaaggtcaaaatatccaaactaccctgcatcagcaaaacggagcctgcaagcgcaaccgtggcaatcccaagctttaacacaagggatgcggatactacaaatgccgccaaaccgaactcattgagaatggagcggtgttccaccgcgcggatcttcttttccaaccctttgaggtattctttttcagcgttgttggctttcagatcctgcaccgtttcaatacactcctgaattccatccgcgcaggccattttcgcatccatggatttctgattaaacccttcctgtacctttgcagaaaaacctacaatggcaaacgccaccggcatcacccaaagagccgccagcgccatacgccaatcgtagaagaacaggctgacggcaatcaagaccgtagagatgatggatccggcaagctccgggataaagtgggaaaagctctgctctaaaaaggtgcagtccgccataatggtgctggtaagatccgcaaggtctttctttccgaagaaggacagggggattttccgcagccgctccgccaacgtaatacggcgcacgccgctttccgtataggtggcaaaataggtggcgttatactggaagtaggttgtcagcaagatcaatcccacacagagaatacagccgacaatgtagaagggaagccggctttccggaacaccgccgttcatcagatcgctcaccatgcagtacagcaatcccaccgggaacatgaaagagatattttgcaggacgcaggcaaaacagcccttaattaaatcctttgcgccctgttcggacaaggcatatcgtttttgcagacgtctgatcatcttactgtacctccttttgtaccttccactgaatggaagtctgatagttctgccacatccgggcgaacagaccgcctctttccatcagttcacggctggaaccgctctctgcgatctgcccgtcttttacaacgtaaatccgatctgcaccggccaccgtggaaagcctgtgggcaatcataatgaccgttttgccctgagacagtttggaaaaagccgcctgtactctggtttcattgtcgggatccgcaaaagctgtggcttcatccagaataatgatgggggtatttttcagcatcacgcgggcaatagcaatccgctgctgctcgccgccggaaagatagacccccttggtgccgatcaccgtatccataccatccggcagtttttcaaggatatcgtcgcactgggcattttttaaggcagccatgacttcctcccgggtggcttccggtttacccagacgcacattctcaaagatggaagctttgatcagccggctgttctggaacacaaaggaaaccgtgttcatcagttcttctttcggaatatcacggacgtctacgccgcccacccttacagtaccgctttgaggatcgaagaagcgggagatcagatttgccagcgtggtttttccgccgccggacggtcccacaaaagcgactgtctgcccggcaggaatagaaatagatatgccattcaaaacatccttttctccgttatagctgaaatgtacctgttcaagctctacagagccgtctttcggatgcatgggatgagctgtttctttcagcggctccaaattcagaacgctgtcaatccgctgtaaagcatcgtccacgatcatagcgttttcgctctggaacataatacgtgtgagtgtcacggaaatgatcggcgtaatgatgatatagaataccagattgagcaaaaattctgtcgtgacctgatcctgcgtaaacagcaaggctcctgcgatcaaaaagacaaacacaccgttaatggccgcggtatagaacatcataggcgtgcgcagctgcttggtgtaggcaatcacccacaccttgtaccggtcaattgaatccttaaacttcttaaaggaaaagatggtctggccaaaggtttttaccaccggaatacctcggacatactctaccgcttcattggacatatcatccagcgcattctgatattccttcatcttctgctgcatttcctttccggtcatcgccatcataatgagaaagcccagaagtaccggcgccaaactcaaaagacccagccgccagtcaaacacaaacagcagaaccagaagaccgcagggagttgcgagggcgttcgcacggtccgggagctggtgtgccagataggtttccgtagcagcgctggattcattgacgattttgcgcagcttaccgctgccaaaatgttccgcaaatcccagggggagttttacgatatggttcatggactgcaaacgcaaattggtggcaatgcgaaatgcgcccagatgggagcacatcagcccggcgatgtacaccagtaccgcaatgaccgcaaacatcactgccatccagccgttgtaggtcagattctgcgcacggctgaaatccggagcgacttccagcacttcacgcatgacctgccagataaaataataaggcacgagtgcgatcaatgcgctgattgcggagaggatccaggacgcataggtcagatatcggtaacttcccgcaatcgtgagcaggcgcgataaattagattgttttttcaagagaattcctcctttacatttcatttatgatacagaggacaatgatttgtccttcttatatctaatttagttagtttaagctaactgcaagtcaaaaattatagggcgttattgccccataattttcatccatcctgcggtgtaaaaggcccgcatttcctttacatagttttccgcatcgggaagcggcatttcatggataacaagttcaaaaaacgtatgaaacatcccggtgatcaaaatatgctccagagttgggtcaagcggcggggagggtctgcctaattccgccagcactctttgataagcgtgtgtcccctccacttcaatttccaccatctcatcaatcagcccagaaaagcgggtcccttcggaacaacaaagaatgagcttacattcctctaaatgctgataggcataatgcagcatatcaaacatgcatacccctgatatatcgcccatcacttccggctgctgttcatggggcaggtcggcaaattgcttctgagcgtccttaaagcgatcaatcaagtattgataatgttcgcccaccaaagcctcaaaaagttcctctttgcttttataataaccgtaaaaggctcccagtgtcttgcccaaagatttgacgatattccgcagggaagcgtccttgtagcctttttgcaaaaactccgcttttgccgcctcatggatttgatccaaagttgtcagattctcatctatggtacacgcctccttaaaaaatatagcggtgctatatatcactgctatattatagttgctcttaagctgaatgtcaagtgcttctgcattttttatggatgaataaaaagagagaaactacacaaaggtttctctcttttggttgtccggctatatacagcggtcattatcctgtttgggttccggcagagcactcatactacgcaggctgacgccaagcgtagaaagattgtgcagtgcggccgatgctgcgggaggtaaaattcctgccaatcccaagcctatcagcgtcccgttaaatccgatgacaaaccgataatttgagtgaattctctccatcaaagccattgcaatacgacgcagcttaacaagctcccaaaggctgtccgccgcaatggtaatatcagcaatttctctggcaattgctgcgccgtcactgatggcaattcccgcatccgcttctgaaagagcgggagagtcgttgataccatctccgaccattaaaacaatatgtcctttttggcgcaaatcggctacaaattttgctttatccgcaggaagaacctcagcgcagaatgcgtcaacccctaagcggtttgcaaccgtagatgccgtccgatagctgtcgcctgtcagcataactgttttttgaattcccaaagcacgcagcgcagtcaatacttctttagcttccctgcgcagcggatcggaaatacaaatcactgctgcaagctctctgccaatcgccaaatacaaatgagaatattcttcaggaagacgatcaaatcgctcctgttcatttagcggaacagttactccctcatcttcaaaaatgaagtgcgcacttccgatcaatacccgttcctcatttaccgtactggcaataccatgagccactatgtattctaccttggaatgaaattcttcatgggataaccctctgcactgcgcttcttgtactacggcgtttgcaatagaatggggaaaatgttcctctaaacaggccgcaaggcgcagcatatccgactcatttcgttctccgaaagtgatgatctgcgtaaccttcggacaagcatgtgtcaatgtacctgttttgtcaaatatgatggtatcagccgccgccaccgcttctaagaacttgccgccttttacagtgatatgttcttttccggcttcccgcatggcagaaagcaccgccagcggcatggaaaattttaacgcacaggagaaatccaccataagtaccgacaaggcccgcaggatatttcgtgtcagcagaaagctcaagatactgccggcaaaggtatacggaaccaatttatctgcaaggttagccgctttgctttcagctgccgatttcatctgttcggatttttcaatcatggttacaacttgatcatatcggctggaacccatagcttgttttacttccagtatgcactcgccttcttctatgacagtaccggcatacacggtgtttcccgggtgttttacgaccggtacagactctccagtcaaagaagcctgattgactgtgacttccccctcggctaagataccgtccataggaatcatgctcccggtacgaatcacgattttgtcacctgggcggatatctgatactgctgtcagaatttctgattccggtgtcttcagccatacccgatccacattcagggccatacagcgagcaaggtcttccattgatttttttctggtccattcttccaacagttcgcccagttccagcagaaacatgacggttcctgctgttccgaaatctttgcgaaatgcggaaattcctatggacagtgcatccagcacatctaccttcagttttcctctccaaagacagtggatacctctcttcaaaaaagggagcatatgccatacaattcgtgcgatctgcaatggtttcggcaaaaagagcatagacgctgcttttagtaccacttttccgaccagcttttcctgaaatttacggtttaattcacggctgctgtgcagtggcaaagtgatttgtgattgcgcttcctgcaagttaaactcacggatagccgccagcacttccttacgtgacccggagtattgcagaatcacacacccggtgcgttcatggacagttacttgtgtgatccatgatttcttttgaaaccaattttccagcacatctgcttcctgcaaagtcatttttttctgaccgattcgaaaacggatacgccctttgctttcgtgtaaaataattgccttcatttgtcgcttctccttcataaaaaaagagccgtatcaacggctcttttctgttactcttcctcagaagtttcaagttgtgcggctgccgcttcttccgcttcttttgcagctctttcttcattcagatctttggcagaagctaaaatgtccgatgcgttttcctgcacggtcgttaccgtttccatgacataatctttcatacgcagtcctgcggctgttgcgtgaacatatgcttttttagcgtctttgctggacagcagtttaattccaaccgatccgaaaagtgtgccacctacaaaaagagccaatttattgtataaactcatatagaatcttcctttccgttattttcttttgtatcctgtaatcattaccatgagcaggcagatcacggctccccatgcccaaaaacggtgctgtttcaaccagatccctccttcatagattttgtctaattattataacaactttagctaaatcattcttttggaaacagacaaaaaccaatggaatcagacctatttcgatactgtctgggtgtacaattaaagtgccttttaaaagctacattgaattgacttaaacttgcgtatccaattgcctgtgcaacgtccagtacagtcatagaagagcaccgaagaagttcagcggctttttccatacgtttatgtgatagccaagtatataccggctgaccacgaatactgcgaaaatattttttaaatgtagtaggagatatataaaatttgtgacacaaataatcaatcgttattttttcatccagatgcatctccatataattgcaaatctcatttatctcttctcttattaccttacttattttaagattatctttatcttttggatacaatgttcctgtacttagcagaaatagcaattctactgacttccaaacgcagtatctgcttttttgaaagtcttccattttgactatttcagaaaatgtagaaaaaacccaagatgaaccatgaataacagcacatccatcttgcttatccatatatttttttacttcaaaagtattcaattttaagtctcccatcatacgacatagggaatataaactctcttttgccgtagtcgcatctacggataccaatattcctgccaaatccgctgtacatgcgacggaatacagtgaagatacctcagatagtaaaagaatttcctgctttcttacaacaaccacacgattccattgttgtttgagtacaacatgacctgcaaaacaaaagaaaacttcaaagtgaagtggctgtaaggatatcgggataaatggatcctttgtattgccttgaagacgaaaattgcaaacatccacacctgttattattgtttcccataaggctttttcacctcggatacttttcaaaaattctgttaacacatagtttctcctcccttctaatagaaattatgtcatgtgatagaatgtagttagcaacgactaactacattctatcacaatttctgtatgaaagcaagaacagcgcaattgatgttataaatagaatagcatttttattctttcgctttaaaatatccaagcgcatcggtacgctctccgttctgccatacttcaaagtgcaggtggtttccggtagaattgccggtggtaccgacataaccgatgacttcgccctgtttcacttcctgccctacggtcacgcagatagaggaacagtgggcatacagggtgtcaaaagtatcgttatggtttatcttgatatagtatccatacccgccgccccaagtgtcgatggcattggcaatggtgactgtgccatctgccgctgtcagaatcggtgtaccacccggagcgccgatatcggttccgctgtggtaggcaatttctccagtaaaggggtcctcacggtatccaaaccatgaggtaatggtataactttgcggaagaggccattggaaaatcccggtcccttcccaatcagtatttggattcatgatctgaccaccgccgctgttaaaaccacccagcagttctgcccacaaattctgattttctggctccgacattaaggcaaggtattcgttctgccttgcattgaaattgtactgctgcgccatttcctccgctgttttatgtgttagagagatttccagaatggtttccgttaccgtttcggtgcgggtagtttcttttccatcctcgtctacttcggtaacttccacttcatggctctcggtacgggtgctggaagacactgcattcatctcccacataatatcccgcatctgctgaacttgagtgtcatccaaagaagccacctgagtgccatcttccgcaccggtcaccttggcagaaaaaacagcgagaacatcttcccaattgatagaaagcactccgtcatttgaagtaaactccacccgattatggctattgctatcttcaatttcttgaatgtgtgcctgaaattccccgtttaaagttgtcacagcctgcgtaacgctggtgccggttcccgtagaatccgaaccgaaaaataagccgaaacaggaaccgacaatcagggcaatcaaacaaattaacaagattatcactacagctacccaacctccggcagcgatggcagcaatcaacccctttacagccgcaatggttgctttaaccgctgctatagttacacggaccgccgctttaactcctgcaattgttgctttcgcagtagccttggcggcctgtgcggctttttgtgccgcttttgcagtggcctgcgctgtcttggctgcctgctgtgcagtctttgccgagcgctgggcagttttgatacctttagcgctattcttcacacctttcatagaacggctggcggtttttactgctttttgaggttttcctttgaccgccttggcagcggtattttgggtccgtattttagaagcggtatccttcgtgatctccgttgctttgctgccagcgtttttcgcttccgagagggtacgggaaatttctcttttttctttgactttccgagcggtggtctgcgccagttttttcccgccccgataggtaatgttggcactcttttttgcggtggtttcgataccggacagcatttgatctccggcgctgttagcgggggcgttggaggtttctccctgctggctggcaaaaggcgtccccttcaattccgatacggctttctccttggatttcagccatgcatccttcattgcggtttttggggctttggcggcactatccaaaagccttggttttccattttccggtttggtcttaatttctttcaatggcatacctcctaaaaaagatacagggagccaaaggaggctccctgctgcgatgttgtttcatgtataggtttacacccccctcagtgcttcgtccggcttggtggtcatcagctggtacagacgggtattgcgggggaagctgttttcaaacggtacaatgttgccagcacagcggatgagaccgcagccagcagatacattggtgatgtagccaagctgggtgtccgagatatggagcagatttgccagttcatcccggtcggtggaggactggttcagaaggagcaaaaactccgagtttgccagcatcaggcgggcagtatcggaacggagcagctcctcgacattctgcgtgagccctgtcacaaggccgttatattttcggatacgcttccacagcttgtagaaaaaatcggcgctgtactggtagcgaaacagcagataaaactcatcggcaaatacccatgtggtttttcctttcttccagttttggatcacacggttgaaaatcgcatcgagggtgactaacatcccgatgggcatgagctgttcgcccaattcacggatatcataggcgatgatgcgggctttggtgtctacattggtgtgctgggcaaaggtgttgagactgccggtgataaacagctcggaggaaagcgccagccctctggcttccggctccggctgctttaagagggaatggtacagatctttcagcgtgggagctgcaccctcataattgtttgccatatactcccggtacacatcataggtgcagcggtccagaatagatttctctttggcagacacaccgcctgcccctactaactgctcgaacagcgagagaatgaattctgatttttcaatcagcgggttgcgctcgtcaccgtaggctttgtccatatcaagggcgttcaggtgggtgttggaggctgcggaaatccgaataatttccccgccaagcgcttctaccaagaacccaaattcagactccgggtccagaatcaggatatcatcattggttgacagcgcaatgctcacaatttcttctttggcactgaaggatttgccggaaccggaaacaccaaggcggaagctgttcccgtttaagagcttgcggcggtcggctacaatcatgtttttggaaacagcgttctgcccatagtagatgcccccggtctgcatgatttcctgtgctcggaaaggaatcagcacagcggtgctttcggtggtcagggtacggatggcttggattctgcgcaaaccataaggaagcacagtatccagcccatccttctgctgccagcgcaggacgctcatctggcacagatgttttctggctgttgtaagaatcgtttctgtgtcactgtccaattgttccttggtatcagccagatggaccatggtcacgagaccgaacatcattctttgatccctgttggtcagatcgtccagcatttccttggtttcttttcgctgctgttccatgtcgtaaggaaggacagcggaaaagttattggctgcgttctgctttcgctgccagtttgccgcattcgtttccacgcccaagagcttgttctggatttcccttactgcttcatcggtgggaacaggtaaaatgtcaatggagagcatgaggctgcggtccatatcacagagttcagcaatcatggaatccttgatatagctggcgtacccctgtaaatacaaaaccctgccccagcggtcgttcagacggaagtgatctttctggaattccatgctgtccgggcaaagccaatctttgaagttgtgtccctttttcatctgttccttgagatcaaaggcaaaagcggcaggttcattgcccttaaagaaatcccggaacacctgcaggcgggttccggcgtccagttcccgtccaatagaggaaagctgggacaaatgagtgatcagatccgtacccacacgggagaaataggtgcgggcttcatcgatattccgcttcgctaccgtgatggtgatgtaacggtcctgcaccacactgttgttggtgccggttaccttcgagagcagcatctcgttgtactctttgcggaaatggttcagcccgtcctctttcataggaagcagcagggatttctcaaattccgctttattgattttccgattgttgatggtgatcttggcgctggctccggaatccagcgcattgaggagctctgaataatcgagaaacatcgctgtcttgtcctcttttccggcgatttgatagttaatatcggtaaaggaaaaggttttggaaaacctgcttcctacctgaaaaatcccatccggccagatgcgctggatagggatggcatcctgtacggacttcgggatggtgaatttttctttctctaatttcgttgctttgacaagcgttttgataataggcatccttcctttcagtgcgaaaaatgaaaaaggttactgttctttcccagctggtggctgaaacttacgctttttccttttgcgtggcggcttttcgccctctgcaatggcatctttcaaggcttcgtagtagagattctcagacttgaacacaagctttttcggatacagaaattctgatttaaaccaagcccatgccacttgttcggcggtcatcccatggtacttaaagaagccgcaggcagcgaatggagctgctccaagaatgcacatccaaccaacttcttcgctgccaatcagcgggcgcaaaccaaaatacagaccgactgctacccctactgcaagcagggaacagataaactgtcgggtggaaagtccaaaaaagatggactcctgataatcccggatttcctttggtacttttacttctatattgcttcactcctttcacggccttacagacctaacaattccttgacgatccggtcgctcatccgcacagctcctactaaaaccaaaaggttaaaaatgagctcgcctacataactccatacggcggttaccgctgagacgttaggatcgaccgctggcggagaagccgccataacggaaaagatgatacaggcaagggcgatgatggccccttccaaacataccccggcataggaacgcaggaagttcttgcccacattgctggttggctctcccgcaaagctggagagagggataggcgcaagcgctgtgtacatatagagtttaaacatacgggaataaaccgttaaaatcatgataaaggacagcactgtaataaacagaccgcctaaaagggttaccgcccacaaagggatgctgtcccaaaatcctacgttattgattttatcgatgatttcctgcgggagtgtggtgccgctgcttcctgacaaacccgattgggtaataatggtggaaatgattccttgtacgattttaaatacagcaagcatcaaatcaagtccgtatgttacagcagccttcgccaaagcaaagcggatgaacaattttaaagcgtgttccgggcgttttacatctgtgaagttccattagagaacacaaagcaaataccctcatattcaaagatacaagggtatgcttaacggtcatgcgtttaggtatttcttcatctccgcctttatcttttctctggcggcagttacagcacgacctacggattgttggctgcaatgctcgattttccctatctctttataagtcatttcatactcatagtggagcaggaaacgccgcctttgcatttctggcagcttgctgataatcctctggagcagttctgcccgttcttcctcaagaataacctcctcaatgcttttaggctgtcttaccgcccgccagttcagagtttcctccataatttccgaaaactccctgtgacggtaatcccaaccctcaattttcctttcgtcaagttccagtctccgaaacgccatatagaagtcataagatacgcacagcttttggatttttccctgcccgtcacgaaaactgatatgatagcttgttcctgcctctgtcactacttcccgaagccagtatgaccgtttaggtatcgccattgccttgtcctcctgctaaaaaatgggtgagaggggttgtcctctcacccagtagcccgcaggaaacagcagggctttagatactataagagttttctcagctttttccgcagatggtctaacctcgcatagacagcacccgccgataaatcaaccatcggcgcaatctcctttagggaatatccctgcattttcagcaggacaatttgcagggtacgcttgtccaccgtaagcaatgcacggtataggttttcgtcctcgatttcattcagcatatcccagactgtattgacctccatgggcggctcctgcatggcagtttccgctatgtattccccaacatcattcaggcgtgtgtaaaaccgtctgtcagaattaaattcttctctatcaaaagtgcgaatttcctcaatcgtttcttcatcaactccgcactcccgtaaaatcttttcttctttttctttccagagccgccatctgcgctctgcctttccgtggttgtatgccactgttctttacctccaatctgaatttttttgaaaatccagattggcaggcggtgagcgacacccaacgccagaagcgggcttatcctgtctcttgacaaaaagcgacaaaagaaaaaccgcaaaggctgtcagaccattgcggctatgagaagtaaaagctcttttatgtagatatttgtcctctgcttttagtgcataaaagagccatatcaaaacaaggaattttttaacagattatcctcgtttctgtctggtaatatgtagaacgccgcacggatcagcggcaggatagaaagtgaagaaagacgcaaaaaatccctccaaactcaaaacgggtttagagggagcattagggcataacaatacagtccgtcaaaactccgtttttttatatggcggactgggcggactgataaacactatccgaaaaagaaagagccgatgatctgtgaaatatctcacaagttcatcggctctgcgtctgtgcgtctggctctttgatgacagttatatgtaattttttcgcattgattaaagtttctcgtttgcatttcgggcaataaagaggataatgcaccaaaacagtatccttccgtattttgtcacgagttttatttccacaaacagggcaacatacccattcagaatttattttttccatattgtcccctcactatttccacggtttaccgccatcgagccaaccttgctccgcccaatacttcccatcaaggtgttcggggtcggatttatgtatggatttctgtatcatacggcagaagaaaaacttaattttcgtaatcaaattcgtgtgtgcggattttgtgtaatccatatgtgcaaacttcttggatagtttttgaacttttcctgtgagtttagcttgtttctttttagaaagtttttcccaaacaatatcgctcatcaacgccccagtaaatatcccgatctcggaaatcccccaccaagataaactgtgctttatatctttcgctgcagattttgctccgctacccaagcactgtgttatgatgactgcccgcttcccaaacatttcaggagcagggcggtgtggcatccatcggtaagcaaaatggtcaagcaatgctttcattgctcccgtaacatgaaacacatatgcaggagaagtcattacaatcaaatccgcttttaaaagcgattcatccatttttctaatgtattcagcgtccttgcaagttttttcgccctttaatgtgcagttcaagcaaccaacacagaagtttggacaatcttttggaagataatattctgtaatattcgcttcatccctaaactcagttaaaaacgtctctttcaagcggtaggtaacaccgtgtttctctgttccgtttatcactgtgatattcaatctttatacctccaaaatgtcgtgtaaaacttgtgtatgaaagttcttgcggttttctttctgtctaaggtcaatccccaatatttgtgatatgatttcatatcgcaggaacatttgctgcataacggtaatcaaatacagtgtttttctctttattgccgcttcatcaaggtcaggacggcaggcggcaacaatcggaagatacgcctcataagttctgtaagtattgtcaccttctttcggtgactgcatgtcggtaagaatggaaattttggaaacagcataatgttcaaacagaaaatcaagtgtcatattgctgagatattccaacttttcaaagggggtaaaactgtccgttttctcccgtatattctgaaatcgcttaaccgttccgtttatcatacgctcaatacattgctcaataagtttctctttatttccaaaatgataattcacaagacctaagccaacgctggctcttttgcatatttcacgcactgtaatttcatctaaacgctcgcctttttcttcgataagtttaattgtttcctgtatgattgcttctttattatccacgctacgcctcctgctgaacaatgttcaaaagcattatactgaacatcgttcaaaaagtcaagggattacgataactgaatagcgaatgtattggtgtcaaaatgccgtattcaagcagcttacagcgaatagaaaatgacggataaggaatttatccctatccgccacagttttacaattatatgcgttacattttttaagtataaataatctccctctccacaatcccccttgcacacgcccgtatgttatacattctctgcacccattctaaagcgttttccgcctttagctgctctgtgataccttgcgcccgtttcatctgctccgtgagcctttccatgcgctcctgcgcctgcctgtcgatgtcggcaaggtaggcgttcagcctgccgcttgtgagcagggttatgtaggtggctctgcggtactctttcagacaccgcaagtgccgctgcccccatacgcctatcggctgttctttttcgtctggcacggtaaggcaggggagaagataatccccctgctgttcataagcgccgcccaactgttcaaagattgatttcgtcattgtcattccctccattaccgtatttttatctttttcgtctttgcgtacatgacctttatcagcagctcgtccacgcagtccgtatatctgcccgccgcaagtaacttattgcggaagtcaatcagagcgtggagtacaagctgcctttcttcctcactaagatacaagtgatattttcccatagcctttcctttctttgagagggcaggcgtttttcctgcaagggtgtttcagtacctttgcggaaaatacccgttcccctatgtagccgccgaagcggtaacagattttaatcatctgttctgccccggcattggtttccgtgcggtcatagacctcaatcctctccacaagaagattaagattttcagcagtcaactcctgtattcccacatactgcgccatcagttccgcccacctgacagcgttctgctgattgtccttaacctcctgcatggcggtttctaaagcctgtatctgccctaaaagctgttcctgctcggtctggtacttatccatcagacggttaaaattctcatgggagatacgccccgatacactgtcctcatacagacggtcaaacagtctcgtcacttcctcgtaccgtttctttgccgctttcagtctgtcggcattgtttttccccttgctaccgtctgctttagcgttcatcttgattgccagagccaccgctttctctctgtcctcataggcaagacgggcgtggtattgaatatccgcaagcaccgccttgtataaatcctcatagaaaatacggtggtctgtgcaggctttggtgtcgtgggcgtaagtggtacaaatatagatacggtgtttttccctgccccaaaagcgtaatcctaacgcctttccgcaggtgccgcacttcacaagccccgcaaagggagagacaaagttatcggtggtatcccgcctgcggctcaaaatcttctcgtttgccccgtcaaaaacctcttgcgccacaagcggctcatgggtgttctccacggtaatccagtcctcctgcggtactttttttgaggcgttgaccttgaagatactctcggtcttgcacatcacgcaatgtcccagatagaggggattggagatgatattgcgtatgacggtgtgcgaccactcatacttgttctctggattttcaaaccgcttggagtagtctttttcgccccggctgtgcagccaccatgacggacagggtacttgttccttgcggaacacggtagcaattttatgcgctcccatgcctgcgtttgcaagttcaaatatccgttttacaatccacgctgtttcttcgtccacgatcagcttgttgtggttgtcgggggatttgcggtagccgatcgggttaaaggacgaacggtacagccccgcctttgccctcgcacggatagaggaacggattttgcgggaattatcccggctgtaaaattcgttcatcacatttttcagagccgctatatcgttgttcttgttggcggtgtccacaccgtcattgactgcgatataccgcacattcttcatcgggaagtaaatctccgtaaagtgtcctactttcagatggtcacgccccagacgggataagtctttcgtaatgaccacatcaatcttgcccgcctcgatgtcatcaagcatacggttaaagctcggacggtcaaaatttaagccgctatacccatcgtccacatagatttccaccaccagaaagccatgttcctttgcgtactgcgtcaacatggctttctgcgttttgatactctcgctgtcgccctgcagcatatcgtcctttgataagcggcagtacagagccgcccttaacattgccattcagctcgtctcctttgtatctgtactgccctcattgtattgcggaagtttgattatctcaaaggtgcggggagaggattttcccctccgcacctcgtttacaagcagggaaataaataattcccgcatatctgcgccgcccgtataagccgcctgcacgatgattttcgggcgcaccgctgtctttgccataggcatacctcccttcaaaatctcactgttccagttcttttttcagagccgcaaggagtttctccgcctccgcccttgtcagcgtaatgcccttgccgcatttctcacgggcaggggaaaagctgcggatgtcgtacttcggctcgttcccgttccacgcaatcaggttgatttcttttgtatagctgctgtcacttgtggagaggacagcgatttctctcacgatttcatactggatttctttcatcaaagacctgtcctttctgtctgttacccgccgaaaaaagaagattatcggctgtcacggtttcgttttctctgcaattcacgctctaataagcggataataaaatcctccatctgctttggcgttgtgcctctggggaaatatttccgcagcttgtccataccgattttcacggtttccctctggtttgccttttcctcggtcataatcgcaaagatggtatccatatcaagccgccccatctgacttaactttttcatgcgctgcgcctgcgaaagagagggagtagcgtcctcactttccatcgtaatccgcaggttttcctgctcgtctttcttcaaaaaagacagttccaccgcgggggtaagggcaatctgcccctcgtccaccatctgcaaaatcggcgggattaactcggtcagacggatatatcgctgtacggtggtctttccaataccaaagccctgcgccaccgtttcgtccatccgcaacttcgtcccaacttgggacgaagttaaatccgtgcggtatccctgccttttcatcgcctccaacttcatcttataagcgaaagccctctcgctcggcaggatattttctctctggatattgctgtccacaagggtaataatcgcccggtcacggtctaagggcaaaacaaaagcagggattgtctctatccctgcaagctgtgaggcacggacacgccgctgccctgcgatgacttcgtacccgttcccgtcctccttcgggcgggttatgatgggcgttaccacaccaaactctttgatactctccgccatttccatcagcagtccgtcctccaccagacggaacgggttatcggggaacgggtgtaaatcctcaatcttcaacacggtaaaatcctgttttttcaatggctttcctacctttctcttgacctatttctattcgatttctgcaattcttccaacacttcgggcgggattttcctgagcaggcgttccaactgctgattggtgcgctgcaactcaaatatcttctgattggctttctgcacctttaattcctctgcgtatttctcgtcacgcagctgccccgcatagtcgctttcctgcccgattttctttttgaggctgtcgatataggcgctctgtttcccgatctcccgtgaaaacttttccgcctccggcagccatgcggaaagcagggagagcgccttatcccgtttctttcctgcgttaaaggcgttaatatcggacagcgccgccacgatttcctcatactgtttatccagcctgccgcccagcttaaagagccatgtggggatatgctttcgccccgtaatcattgaggactgcccccgttccaactcattccaccgtgcggacatacgctcatggtaggcggtctgccactcggataaagacttctggttgcctaaaaagtatttggcagacagctttccctctggcgtaatcggcacaaagcaaaggtgcatatggggtgttttctcgtccatatgcaccacagcagagaggatattttgctttcccacacgctccgctatgaagtccaaagccatagcaaagtaggctttctgttcctctggcggtaagctgttcataaattcaggagaggcggtaatgagggtttccaccatcatcacgctgtctttgcgcaccttgcagcctgcctcctgcaccatacggttaatctcttttttgtaggtgtagcgtggcggcggcacaagatgatagttgtacttggagcattccatatcaatatcgggattgctcttgtacgcctccttcttccgttcattgtggcgttcacaggcagccacagagcctgccttgcgtttctggaaacgcaggattgcgtaaggcataagcgttcaactcctttcttttttcggcgggtgttctttgggcggtgacggtggtgacagtgatgacggtggtaatgggataccctcccagatggcacagcactgtcaccggcaccgccttttcccgcagccgtaggcgacggggagcagggcgcaagccctgcataaagggagtccagagggaacgtctggcacacgctccttgcctgcaaggtgtagtgtgttacaccctgcaaaagcgtgctgtaaaaaccggggcggttttttcagccgcaggggtggctttacgagccgagggaagcgagaaaagcccacgcctgcacggagcgtttgcggggtgttctcccgcagggtggcagggcgcatatcgaaaaagcattgtcatctccgccacgcctgccacccgtagggcaagagcgatagatttcactttgctgtggtgtcagtgacagacgcaaggggtatcccgacatcgccgtcaccaccgtcatcactgtcacccgactgctttgtgagcgcaatcagcctgccctctttcttcctgcggtacgcatacccgatatggttgtccgctaagaaagtcgtgcgatactcattgagccacttggtaatgacggtgggtggggtgtctgtttctttcatcgccgccagaagctccgtggctgtgccgcaccagttttctttgtcctgcatgaactctacgagccgaaaaaggacaggcggtatgctttccctcgcaagctgctcctgaccttttcgctccaccatctcccaactgcactccctgaaacgcaggacaaactcctgatactcaatatccctgcccacacagtagagccttgcggtgtcggacgcacgggtttccttttccagtacaaaggtagcgtctgcgctccccgtcagccctgttgtccccgataccttgttgaacacatcgctgtcgttctgcttgcggatatggtggacaacgatgaccgcaagggaatgccggtcggcaaactccttaatctgggaaatatccccgtaatcactggcataggcgttgtcttttgaggcggtgcgtaccttctgcaaggtgtcaatcacaatgagcctgctgtcggggtactccttcagatagtcctccaactgcacgatcagcccgtccgtcagcttgcagctcgccacagcgaagtgcaggcggctgtccgcctcgtctgtcagacgaaaaagcctgtcctgtatgcggaaaaaggtatcctccagacagaggtacagcacatcgcctgcccgtgtctccatctcccagaaaggcagccccgccgacacgcataagcagagtttcagcatgagccagcttttgccgattttctgtgagccgcagaacaggatcagccccgtggggataagaccgtccaccacaaagcgtggcttgtcaagcggctgatagagcaaggtatctgcgtccaccatgttcagcttttgcatgggcgtcctccttccgctttcgtctggttgttgcatacttgtccataggcattcgacctccttaaaatttttatatctccgccataaggacggggatatgtaagcacagccattccatacagttccacgctttcccaaagcggcgttgcctctgcctatgctgtgcatggattaagcaatgggtgcgctcgtatcatggcggcactgtccgttgcggcaggtatccctctggcggctgctgtgaaattttcaaggtacagacgggcagacttgccccctaccttacagcccgtgcggatagccgattttggacactgtgttctgattttttgaaaaagaaaagcacctgcatatatccgttcttttctcggatagttgcaagtgcttgccatcggataaatccgtattcagttgtatatgttctctaacagaaattcacatcggtaaaagagccgcaggttttaacgacaccaaccgcaaaaaacagtaccagcaaaccatacccaatggctttcagcgccccgttaatatccagcataacctgccagatcccgccgcccttgaaagtggcggggtcttgggtaagcagtgtccagatttcagccagtttgtcattccatgtacccagcgctgaatttaagttgtctatgatccagtttccggctggtcacctcctatctgaaaaaatgagggagtgcccaatgcggacgctccctttgctggaaaacagaaaatcaggcggtgataaggtcaaggatttccttggcgaaggtgattaccagcccaccggccaaggtgaggaaaccctgcgaacgctgggagggatcatggctctggaaggacaggccgacctgtacgacaccccagcccagcaggatcataccgatggcacgaatcagggagaaaatgaatgtggaaaggttgtttactactccgagaggatcgccgctggctgcaaaggcagtagtggaaaggcagcaggcacacaatactacagcggcatagctggaaaatccaaggcgtccctttttaccaagcggcagagcattggtgggtttattgtcctttttgcggttcgtcaaagaaccaatttttttcagaaacttattcagaagcgttcctccaatttcatgtaaattattatggtttgagaaaatcctccggttccagcagttcgaaatcctcatactggtccggggaataatcgagatcgtctgcggcgtccttcgcatgtgtgtagtcgtagggcgcagcgccgccatcctctgtcaggcgaatgtttgggtgatgcatcaggtcgtatttgtcatccagcatgggcctttcaccccttacaaaaagaatggctttgcggttatccagcattcggacttcatcgggcgttaagagttcccggcctgtctgctggtcgttgacactaaagctgccgcttcttccacggctgtgaccataggtgttggtatccaatgtttccttgcccatgagctcggaaacatatttgtgggtttccttctcgttgccgccgaggtagagaaactcatcacacaagcccaccagcgattcccactgttccttgaacaatgccttgatttgcgccatattctgtgcgatgtagctgcagaagatattgcggcttcgcatggtggaaagccaaggtaggaagttatccgtaggcagggcgatattcggcgcttcgtcaatcagcagatggaccggcacaggaagcctgcctttgtatttgcggtcggctacaaaatagagtgtctgaatgagctgcccgtaaatcatgcccacaaggtagttgagggatttgtcactgtccgggatacagcagaacagggcgatcttcttttcgcccatttcttccagatggaggtcgtcggtgtaggtcagccttgcgatctgtggcagattaaaagcagagaggcggacgccgacactgattaaaatagatttcagagtttttccggctcccatcttaaagacatggtattgcttcacggcaatgctctccgggtcccgcatttcaagccttgcgaaaaggatatccaagggagactcatattcctcatcttcctcccggacttccgctgccgccagcatttccattaccatggcgaagttctgttcctccggcggtgcttcatgcatcaggtacagcaccagcgcctgcaaaagcgctgtttcggatttcgtccagaaagggtccgtgctctgtgctccgggcggagtagtcgactggatgagggtttcgatgaggcgaagaacatccttgtcatcccgcacataagcaagggggttatagcaaaaggaggcgtcggggtttaatagatcaaacactcgcacctcatatccgtttgctttgagcgcaccgcctgtttttcgcaggatttcactctttggatcgcagataaccagagaacagctgccgcagtttaaggcattcgggatagcataagatcggcttttacccgcgccggagccgccgatcacaagcacattggtattgcgcttgtgccgatacccatccatccccatttggaaatgctgtgttaagatgagattttgtttcgggttctttttatcccggtatttcttggcgatttggaacacatcgccccacttggcggaaccgtgttcttctccacggcggcggtttttctggttggaggtcaccacaagggcgatcaccccgtacccaagggaaaagaaaaacaggcaccgaagagaataatccgtccaatgaatggaaaagggactgttcatcgctgccgaaagctttcccagcagatccacaagactcattccatctgaccagcttccagccactaaaagcgctgcccaccagacgatgggcaatggcagaagccatacccaccatggattctttcgttttacaatggagtcaaaaaatatccttcctttcttcagatcaaaataaaaaaagaaaccccggagcctatggaaaaccattcccacaggttccggggtaacgggtaaccttaaatcttatcgaaccggcacgtttcgatatttactgctcatgagctttgcgagaacacggtcaatcccgccgctgcttctgcccgcagacagataagcgttgcgcattccatttaaagactgcgccgcatactggaattccgtgtcgctcaggtacagctttccctttggcgcattgacggttttattgataaggctctgcacctcgccggaggtttccgatccggatgatttttgtgcgtcgcagagcgccttgaccagaaaattcttttccagcattcccatcttaaagagacgttgtttttccaaggatatccctgcctttctctgtattttcttcagcttcaccataccacagcggcggacagaaagctaccgcacaaaagaaaacaaacggaaaacttccggcggttcgctttctcatcgttccgtttccttctccgatttggatttgggagttttggcaggcttctgcgtttctaccgaaaactcatcgggctggactgtctgctccaaatcccgaaaactgcgctgtatatcccggttaatggaataagacgcccgtttcacatcgcttatgaaaccacgcttttcttccggggtcatttgagcacagctttcgcataccttgtcaaaccggaaggccgaagtatccagcccgcaccgctgtgcgaccacataagcggcacagtagctctgtgccgcatacgcctgacggtagtaaccgctgccgacagtatcgaagctggcatgggcctgttcacgtgcgatagcgcagatagtggtggtttcatccatcccgttgcggacaaaaatcgtatgctgtttgggaacatactgtgcctgtaccccttgaggaagctgatccgagatggcaagctgaaccggactctgttctaccatagcggcaatgatttcttccggcagatgtttctgcggcggcagaggctgtggacctctggtttgggagatatcataggctttggtaatggtataaccattcgctatggtgccgtcctctttggtatattcctgatccgcaaagaaggtgtatcccttttcaccggaacggatggagcgcccggcttccttccatttatcaaaggtgcggggatgggtgatctccttgttctgatgatataggatgagaaggttgcgggtactctgcggggtacactgagccataaaacctaagaagcccttcatggaagcgtcatctttgaacacttcctgtgcctgagcatccacttttgcccatgcgtcctcacgttcagcctgtttcatggaggcatattcttccttggtgtactgctgttccggctgaggctgagtttcctgttttctgccgatcaaatttgataaatcgatactgcattacctgcctttctgttttttcttctttttacgggaatggcccggagtaggatgctgacgatcctgctgtttggccttttcctcttttttcttcacttgttcctgcttgatctcctgcagttcctttttcaccgaaggcttttgctccggctgctcacggtttgttaagccgggcgaagagtttttgctgggcaaggaaggctcggacggactcttttccgctgccgggggttttgattccttctcccggccaatggtaaaattttcggcttcaccctgcccggcaggactgatattgaagtcatcttcaaagccgcccacctcgaattccacagcgccctgctcggtttggacagtttccgttttgccgggttgggaagcggcaggagcttgcttctcctgttccaccgctttctccacaatggcttctccggcttccgctttcacataatccaagccgagattgtcatagatacgctgaatcttagcggcgtcatccgcaaataccaccaattcgatgtaatcgcctttttgtttattacggatgggcacatacaaaagaccgtgtcctttggcttcccgcacaaattctttcatgtacgttgcaggcagattaaaaaacttaaacgggcgctgctcacgaagcattcggacaagccttgtcttgccatgggttttcttttggtctttcagcactgcataaacaaacagcgcaaaattcttcgccgccagtcccgacagcttgagggctacttcggtcccttcaagggtaaatcggacgatctggtcggcaggatcgcttccgtagttcagtcagcattctcctttcatcgttccaagctgctggagcgtttgtgttttgctttttccggcgcaggttccttagaaaaggaatccacgccgggaatcagggacaggctggaaccggtatcccatttcactccgatctgcccgatatcgtctacataggcaacggtgccttttgtacccggaggcggagcctgcgaatcatccatgtgatttaagatgatgcgggttccgacaggatattgtcggcggatgagttccacctgttctcttgtgggaattttatggataggatcatctccttttttgattttcccgatttcgggtttgtttgttcttttcttcctgtgtctgcttttcctgccgctgctgttcttcctgctgtgctgcctgcaggcgctgttccatctcaatggaatgggtttcgatattccggcacagcttgacggtatgccgcagctttttgagttcctctgtgaggacgccaatctgcggggaatctggctgataacggtagagcttctggcgctcttttagaagcactgcgatttcatcctccgctttctgacggatggcacgaagccgcccgcggtcctcaatatggtttttgaaaatgaattcagcctgttctatccgctgatccagcttgcggatatcttgccgcacagcaaagcttgggtaccggggctttttcggcagcgcccccatcttgtagagataggaatagtagagcgcccgcaagccggaaattctgcggggcggcttttctccaagaagaataaggaagcggctggcaggaggtgtttgtttcccagcccggtgaggaggcttaggatacaggatgcggttttggatagcttccggggtgtagttttttcccaaggttttaaaacgaacggtgcgcccggtacccggcaggatcatggtggcgtacttgcggtcaaaccggaaagcatagccctgtttttccatcacccgcaggaactgcttccatgtgagggaagcggcaatcgcttcttcgatatctttctggatgggtgttttccatgtgtaggtaccgttttgctcggccagccacagggcataaggacgggctacccgttccgatttctctgtatggatgacggaaaggcggtgctttacgcacagttcgtccgaaatcttccgcaccccagttacataggttttttcattgctgcggtactttttcccgttttccatggagacagagttccacacaatatggttgtggatgcatttggtgttgagatgggtactgaccaccgcctgaaatttcccgccgagcagccggtccgcaaattccattccgatttgatgcgccagttccggggagatttctccgggagcaaaactctgcaccagatggaatccctgcacgcctttttccttatgccatatctttttgatctgacacatatcctcaaaggcagagtctatggtacagccgatggctgactggaacagatcctgttctgactggtctttattgagagccttatcgatttctccttccaacgattctctgttttcggcacgggaagattttttctcatcgagagcatagtcgatggcgttatcaaggcggtggacggggataacgctggtatatgcgatagcggttttctcctttctgagttttcggtgcgggcagcttagacgaattcatatcttggctatgtgcgcaaattgcatccaaccgcaggttggttaccaattctcctttacttctttccaaacctggcgggcgataacggtcatttcctccacgctctgctggctggcttcgccataagtattcgcaaccttggcaagctgattggcgttattgcaaagccctgccactttgtgaagcaggtccgcatggtgatcgcagggttttgcacgcagttcggctcccatgatgagggtgcgcagaaattcctcacggggcagaccgctttgtttcacctgtgtttccagatgcgccagttcctttttgtttaaatgaagagggatgatgtgatttcgttttctcatagggactcctttttaacgctccggtactttccttttgcggcttttcttctgctccggcgctttagccggatattcgtaatggacagggatatcctgcaggcgaagcttgccgcagtccggagcgaaagctgcgtatcgggtataacagtatccttctgattctacaaggattccgtccctgctgttttctcctttcaccagtacacagtgccagcagagactgccgggatcgaaccacatcttgtcttggtaatcaaacaggaaaatctgatcttgcaaaaatctggtttcctgaaactgacgatattcttcatcagccaaaaccaccacctgttctactcgaaactcagtctggcgctctggtgcaggatgtcttagattttgaccgttgatatcggatagatcatggggacggtggtaaaatacagcgtgttcctgataggcttttggttcttccagcacaaggtgttccattggtacatcctgcaggtttactttgcggcagtcctttccataaccaaggtacaggctgtttcgcccctgtgcaatcagcatatattcctgttctcctttggtcctaaccatcagacagcggaacagcccgcccggatcggcgctcatcagttcccggttatccttgaggaaaggatattccggggagacgtcctctgagagcttctcaaaatcctctttgcccaagacgatgacctttgtcacttcaaaaacgccggggacataattcacctcgttccggcgcaggctgtccagtgttttggcgtttgccgcaaatgcagcatattgtttctgattcagttttctcacctctttctatattcgatgggcggctggatgccgggggtttggggttctccccaaaatgcgtttggatatccaaacgctatgcttgcaaaaccagtcaccggctgggaaaataccacgctggaatcagagcccgtcatgttcatctgattccttgatttttgccagaccttccagcgtcgtacagataatatttcgcttttcggctgtaccgatttcagcggacatggagttgctgatctcattgccgcataccaccagcattcggcatcggcacagtttctgacgggaaatattttgaaattcccgtttttcatcggcattttccatctgcaggtactggctgtccgaaagtttcgggcagatcgggacatatcccagttcataaatcttgcggcagtagcgttttaacaggcggggcgcggcatcgggtgcggcgcacacataggcaaatgctttttccatagtgatttcctttcttttcatatattgaataaaggggcaggctatccacgtggatagcctgcttgtatgactgtctgtttatggctatccacggggatagccttggagattattcggaggtttcttcttccgaatcggcttccaatgcaaagcgcacacggtcggaacccagcttataataggcttcggtgacttcaatccctacggcttcatatccttccagccgggaagcgagaacggtagttccggctccgcagaagggatcgaggattctcccgcccggtacacagattttcacaaggtcacgcatgagctgcaagggcttttccgtcacatgaattctgttttgaggattggcgtaacggaacacaccgggcaaacagccaaccggtctattcaccggcataggaccattggaaccccatacgatgtattcactttgctggcggaaacgtcctttctgggggcggctggtcatcttatcccataccgcacagccacgccagatccatccagcccactgcagagcgtcggtaatagaaggatactgccgccagtcaatgaacagacaaaccggcgctcctggtttgcaggcttttctggcgtcagaaagccattcagccatccatctggtccagcttcgctgatccttttgatctccgtcaaaatcgggcagggcgttttctttgtccatgctgctgtacttttgattggtggtgcggtttttctcggctggcttccacccgcccgaagcgtagggcggatcggtaataatggcgtcgaacacctgcggcttgaatgcccggattacctgcagggtatccccgtgcagaatcgtccagccatccccgccgctgtgttccatgggcagaatggtttcgtcaacaatttgagccagttctttcgtttcgttcagaggcatcttcctttctaaaaaaaaattacagtgttttttatcgttcttcccctcggctgcgctttttagaggcacgagggtgcggttgatattcgggaggaggagtaataacaggtgactcacgtttgaattttcgttccaccacaatttcatctggccggatgtggagcacatcaatggtggggttatcaattacgactccgggcagaatgactgcgtgttcatgaacctctatctcgccgccaagctccccgtaaacagaagctttttccatgattacaggggttccgccggtaacagcattcgcaaagattttggcatttccagatatatggacgtttccatggacataaccagaggttacgatagcatgatcttctatgatggcttctccaccgattcggctttttccggaaatgactgcacaaccacgagcgcaggagtaatcccacatgatggcgtcaccggatatataggattcctcggcggcgacagcattgttcgcaacccagcactgcccttcctgactgagattttcctcagactggacgaaaccgccaagatctcccgcatggacatcctcacgaacatcccgcaaggcccgaatacggtgcagccatgggtactgcgggtgaacaatgtcggtaatctcgtatttctgattcatctggcgtcacctcgttccttttcgtttttcgacttcgtatgagttttctccgataattccgtttccacatattcgctaatgatattaagcgctttgtaataattcccggactggtagacacggtcacacatctcctttgcctgatccggctgtccgttttccttcagcagccgggaagctctgccgaggatggaaaagatgtttccgtcctgtcccaccaatttcatttttggccgatgagggggtaactgctctttcaggggttctgcaggctgcatctgctctacttcaaaataaaatggttctgcttctccaaaatgaacatacagcacaccatcgtcagtctggatttcctgctgctcaaagccttcgccccagccatcggaaaactgtccatgcagataatcctgcaaatcttccatttcttcgtcagccaacggttctttcagcacgacagttgtacagcccatcaattctccgttccgaatttctatcgaaggaatcgcgctgattaccttttctttaattccgggattgcgttgtttataaaagtaagacatgaggtttccggtatactgttctacagcagggcggatgctttcctcatagcagaccatatccgtaccatcaaacagcgtgggataatcggatactccattgttccagccatactcgtctatttcattttcgtggaaatctcctgtcaatggagagtaaagtttgagtgtaatttctttatccgctattgcaaaacctccttttaacgggaacaggctgccctttgccggacagcctgtttttcgtatctttcttttgtcaggtcggcataatcgcagccttctttttccggaagattcctgaccatgcggtacttgccctgataggctttctcaatatgatcggctgcccaccttcccgcaaaatcgttattggtacagatttcgatttcttcaatctccgggtgacgggcgagaaaagcgtccagcgcaatgggttttttcatatcccggcttgtctgtgttccttcttcaggcgcataaatcccgccaagggacagccgccatttatctgttgtcccttccagcgttaaatgtgcgagtggctctattgcggcttcatatatggcgagttttttgctttcccttttcggcgggagacaaaaacaaaaccgcttatcgctgccggacacctctgccttgaatgggtttccccgtgtataggtaccacgcagaaaagcataccgggcagtaccggtttcgtccttcccaacaaacacagcgttgtggtagtcggcgctttcgtagaggattcctgcccggatgcaggcttcgatgaccttgcggtcgataccacgcttcaaaagataggcaaacaccctgcggttattttccgctgccggcggcaaaagaaattccttcggctgttccggctgggaaacaggcggaacatagctggggttttccccgcataaggtctgcaccgcttctacaaatttcagcccctcaaccttaataagatagtcaagggcgcttttgccgccgacatcccggcttttccaatgccaaaggcttgtggtttcgttgattttaaagctgtcatgttctttcagctggaactcaccccggctttcggctttcaccagttgtccgggacggtaacgccgcaaaaactcaatggcgctcatctgtttggcagcggtgatttgttcttcggtgactccgggcatgggaatccccctttcttacttaaatgacagccgcccgcaggattttcgcctgatcggtgcgttcccacgggaactccggcctgccgaaatgtccataggcggcggtcccagtatatctcggtgataacagatccagctttgcgataatctcggcaggcgttaacccaaacaccagttttaccgcatctgccagacagtcatcggcgcagaccgttccggttttaaaggtatctacttccaccatcaccggttgggctgccccaatagcataagccagtgtaacctgacaccgttcgcacaaacccgccgccacaaggtttttagcaatatatcgggccatgtatgcgccggagcgatccactttggtggcgtccttaccggaaaaagcaccgccgccgtgaggcgcgaacactccgaagctgtccaccatgagttttcgtccggtgagaccggtatctgcttccgggccgcccagcacaaaccttccggctggattgattaaaatttttgtatcctcatccggtggcaggacctgcaaagcaggggcaatcactttatccgtcagttcgaagcagagttcatcggcagggatttcagggctgtgctgggcagacagcacaacggtatccagccggaatggttttccatcctcatcatattccacggtgacctgtgctttcccgtccggccttagtccttgaattgcaccggattttcgggcgatggtgagagcgctggtcagacggtgtgccagcacaaccggcagaggaagcatttgcggggtttccgaacaggcatatcccaccatgattccctgatcgccagcgccgagctgcagagagggactgctcccatccacatttcttcgctgctctaacgaacagtccacacctgcggcgatatccgggctttgcttatggatgaggcactggatggcaaaacgggccggattgtagcctacttttctgagaaccgaacggacaatcgaagggatagaaggttcatacaggctggtaatctccccggcgacaatgatctgccctctggtagccatcacttcgcaggccacacgggagagggcgtcatgggaaaggcattcgtccagcacactgtcggcaatgaggtcgcacagcttatccggatgcccttccgtaacagattcggcggtataaaattgattcatggcattctcctttatctttcatgattcgggggctttttggttttgggttttgggcttaccaccgggtttattcggatacacaaaagcccttccggtgtttggatgaatttctcagggcttaaaaacatctgctgatacttctgcatttgtttttcagtcaggctggagaagttttctccctgaataccacagacaaaaaaagctcccgcaattatgtcatagttctccagcacacggtttagcggcagccccatattttttccttcgtcattgcagacaatagcaaccggttcttcccacggataaagtgcctgaatgggtccgcctaccatttgctgcatttcatgaaggtcgtttttcatctcaacaggccgggctgctttgcccggttctacaagcaatactcacattccggcagatcacctcacttgcagggaaaagggcttgaggcttttcccgattgcttcatagttttcaaaatgcacctcgcagcccaacagataagacaccgcttcttcccattcctttaaagggtatctttccttgtccggcaggcggtacagatcgccaagcgccgcccatttgagttccggcagcagacgcaggttggagataaaggtgcggtgctgttcggctaccacatccaaaagtccaagttttttcaatcaatccctccagtatgataaaaatagggacggagcgctccgcagcgccccgtccgattggttcttacgctattttttcctgcggttacgaatatgcaggaacacaaggccgcccaaaatgacagcgcataaacagatcaaaataattgcttttggttccattgattgattctcacctcacttctgcggcgatgaccaccgtgcgggcgttttcccattcataggaacaggtgacgagcgtcagcaggcggcagtcctcgccgtggatggtttgggattcgtataatgactgtgcgaagagctctttctgaaaagacaggaaatccgcatgatccgcaaattcagtgcggttaaaccggaactttgtgatatcggttttcagcacagccgcaatttgatattcccgcagtccattgctggtctgcagcaggattttggagtgttcgttgcggaaggcttcatcagtcatcttttgaagaacagcgaacatggtcccgtcattcatgttgtgcccgtagaccacggtattttgactctctgcggaacaatcccattgaaaaaagatgcttccggcagtgcgccattctcccttgtaggtacgccgcagatagtattcgggatcgtcagcgctgctttgcaaaaccgggtaatccacacaggtgccgggaatggaaatccagcctttgatgtccgggtattcagtctgcaaagcgggaaggtccacaagggattccggttcgagctgttctttcccagccggtaaaaccccggagctttcggctccggggagaggctgtgcgtattcttttttcagggcttgtgcttctccattggtcagccccggctgtagaaccaaaaaccagagaagtcccaataggctcaggcacaaaaggccgatgcaaaatccttttagaaagattttcattcttctgtgccttgatcctcatcggcctgatcagcagatttgcgctttttacctgtatagcgcaggaaaagcagagcgccgccggacaaaactgccaagcctgcaagagtgccaaggatggcaggcatccacgggttatcgccggtctgcggaacagagggaacctccggcaccagcttgttatgcatctttacggtcgttgtttcgcctgccttgatttctacggtctgatcgtcaggcagaatatacttttcggaatcttcgccagctacttcagatacggtgtattctcccacacggagagtgagattgatttcaccgttttcatccgttttgaattcctgctcataggcattgcccatgaagtcagtaccgctgattttgaaggtgcgcccttcgaccttatcatcgtcggcggtctttaccacctttagggaaccggtctgcgctttgttcaggaacccttcgccagcttcggtttcgatgcggacaatcgcttcattctcagtaatggagaaaggataatatccgtcatccttttcgaaaaattccggcgcttccttctcatgcaggaagtaatttctataaacaagatccttcatctggtagaggcccggttcggtttctgtcatttcacctgccagcttgtcgatatccgcattgaattcaccattattgtccacatcggcataaacttcaaaaacagccccggacagcttgtggtccggataatcggcgtccacctttatggtttcggcggtacctttgatgatctggttttcaatggtgatttcgatggtctgtccgtcctcggtgatttctaccgggaagatttcttccgtcaatacgaaggcttccggagatgcgatttcacgcacgaggaagtttccagcaggcacattatcaaactcaaagtacccgatttcattgctctcggtgaccatgagggcggtttcttcggtaaactccgtttcgtcaaaacggaacaggccgataacagcgccgcctaattcaaaaccatcctgatcgaccttccagccggataccttgccgcgctttaaggtattttcaatggcttctccatcgttcgcttcaatttccactttcgccacatcctgtccggcatactcaaacaccacaggggattttttgtcgctcaaaatgtagtgatcgtcggttccgatttcctgtacatacagggaagccccgcaggggatgtcggttgtaaatacggcattcccattctcgtcaatgccgattgtttccatcagcccgtctgccgggatggaggtaccatcggaggcggtcagttgttccgcagcgaacagtccgaaagtaatgtttttccattcctcattcatgccgagggagaaggtttcgtcctgttccagcaacttcttgagggaaatctccactttctggcgttcattgacgaaaccaatgctggcggaggtgatctctacttcctgaccggcataggacaaaacgacttccttgggttcaggatcgattaccatgccatccggcgcagtgatttccttcacctgatagcggccgagatacaaaggttccgaggtggcggtcccgtcacttccggtggtcaaagtagccgccagttcgcctgctttcaggtggacggttccgtccggggtaacgacatcttccagtgctgtgatttcataaacagcgcccggctggccctgcacctcatactgaggctggtacatcccgccggattctgcaacagacttaaatacttcgccctctttggagactgtaatcgttcccttttgcgggatattgtatttctccactgtaaccacgtcctgtgaaccgtccaccacaaagggaaccggctctttgtcaagaacatatccccatggactctgctgttcatacagctcgtaatttccaaacggaagcggttccggcagcataagggttcctgtggagtccgtcacaaaggtgtcgatatcgatggggctggggtaattgatatgctgtactacccactcgccggtatcagcgttgcggattttgactgctgttcccgccagaggaataattttgccggattcggcgtctttcttctcaaagcggatgagcgaggtaaaggtggggttattgagaatgaaataataggttttaccgtgctcagaaatgaacacggagaagtctgggacaaatttctgtccttgggcacctttggtctgatgcaccacatacaagccatacggaaggtcctttgaacgggcaaatccataggaatcggtggtcagcaggtcacgctcggtttcttttgcgttctcatagctgcctgcgctggccagataaatctggaactgagcgccttcttctggctgctcgatctgatcggaatcgctgctctcagcaggtttgtccgtatgcttggtgatagcaatgctgccgaggataacatcctctgtagcggtcatggggatgctgttgttttccaaggtgaaatttcccggttctgcacctaccggatagatggtttcgtccagcaggtatccttcgctgggcgtaatctcacgaattgtataatccgatccgcaggggtattccttggtggtgaatttgcccccgtttgctgtggtataggtatccagcagattttcccctttgaacataccgtataaagcgccatccaaactggaatcgccttgtgcttcctcggtttcggaatccactttatccaatttaactgtaaatttcttcagaagattggaaaaactcacgctggaagtctggccgggatagatggttacctgcttggattcaggctggacatatttgtccggggcacgttccgttacggtgtatgttccagcttggagattgtctacccggatgcttccgtccggtccggtcaccacgtctttttcgattccattcccggaaatatgaaaaggaatgccggaaacctcgccatcttcggaggttttcacaagctgcagggtacccgccttgatctcaagggaaaaatagcactttacgggttcagcggagcctttgacgtcaaaagtgactacattctggtattcatcacgcagccagtatttggtgccgcctgttacaacaccggggatagaggaaggcagctccttttctgcggtgattgtaccgaattcctttttatccgtagaaacatgaagtttgttcccgctgatggaaaaatccactcccggatagctgacggagaaatctttgagaacattgttttcatccaccagtgtggtttcattttttccagtgtcctcattgtatttgaggtcatgtgtatatgcgccgaccgcactgggattgtcggtggcaaaggatggaacggtgtgataagtaaccacgttttccctcagcttctgaaagatcgtctttgccgcagggctgttggcagtaatttcattcacgatctggttttcatatccggtgccaagctgcccgtgggcaatcagccaaatgaggatttgggtggcaatgtattcatccatggcgctcccgccgtacttagtgccggtttccacgttatatcccaaggtcagagcagtgttgatcattgctttctgttccgtggtaagggcggcataatcatccgactggtcatagccaatcccggtatgggttgccacgccaagctggatgcaataggcggtgcggaaagctgttaaatcgttaattcgcagttcagtaaacttatctgtgctgtatccgccaaatggcgccggaaggctggagctaagagaatatcctctgccgttatagtcgatcatggagatatatccatcatactcgtattcagcggcaaaagcattgcttggtacaataccaaagcaaagaagcactgccatcatcatagacagaagtctttttagatattttttcatgaagttctcctttcggataaaataaaaaatgcccccgcaggctgaaagaaaactctcaacttacgggggcaagtcaatttatcgttcttctttgtgtttgggatggcgctgttttttgtgagggactaccttctgaggcagttcctgctgtgtacagcgaaccgcttcgattacagtttgggtatcgatcccattttgtctgcatccattcagaataccttccaaataggaaacagagggcatggcgggtttgtctttatacgggctgttcatagtataggccatgatttcccgtctgactccgtcctgattgtagtagtcaagaaaagtagacacgaaaaatatttatttttgatttgctttttcaaaagtagacatgaggaatatttttgcagaagttgttttttcaaaagtggacacggacaataatttttgccgaaatcctttttcaaaag

SEQ ID NO: 17 - DNA, 514199 bp, Intestinicoccus colisanans
  source 1..514199: mol_type = genomic DNA
  misc_difference 200573: note = n is a, c, g, or t
  misc_difference 513859: note = n is a, c, g, or t
gatctgagatctaccattgagcaggcaatctactatttcaacaatgagcgacccgtccgcaaactaaaaggaaaaccaccagtcccgtatagaacagaactggtggcataagaaattttgtgtctactaactattgactacttcagctttaaaactgcggggtagtccatatcaagtgaaattttattccacgtccgtatggatgaggcggtctaacagtgtgatgagtaaaatgcgctcttcatcggaaaggtcgcgcgtgacgcttttggcccaatcccgcaaaatctcgcggatgacgggcacgagcttttcgccgttttctgtgacgtagaggttgttttcgcggcgatcttccttgccggtttcgcgcgaaatgtagccgagctcttcaaggcgttttgtgcggcgtgctacggtgcatttgtcaatatacatgtgcgagacgatggcgtcctgcgtggtgccggggtggcggttgatgtaaagcaggatcatcggcataccacctacaaagccgtagccgcgcagacggtcatccatatatcttttacgctggcggtgcagataggtgaagctgcggcttagatcacgcggaaaatccgcaaggcgttcctgttcggtttctgctgttttctgttcttccggcatgcttacacctccgtatggtttatggctttattatatggcttttgtgcgaaaaagtcaattcaaaaatccgcttattccgcgataaacgggtgacagacacgcttatacagttcgtcgtcgaacataacgtgataaatgttttcgagctcatgcagcacgactttcgcttccggtacgggctgcgcgatgggcagcacaagtatattgaaatccacgccgtacaaaaggctttttgcttttgtcatttcgcacccgcagcgctcataaaacgcgatgcggcggcgacggatgttgacttcttcttcggcttcggcgctctcaacgctttccacttcgagcaaaagaccgtcacggtctttcatttctgtgcgcagcaggggaaaagtcttgctgccgatgcccgtgccgcgcaggtcttttttgacggcgaaataatcaagcagggcgtatttgccgttttccgtgcacgaaaaataggcgtaggcgcagagtgaatcggtttcgtcgtaaaagccgtaacacgggtagcagtttttattgtagagcatttccatgcttgcaaaggggcgcagctcgctcggcgggaatgcctcgtgcatatatgcgttgtaaatttcgcgaatttcgtctaaattcagctttttaatgtgtaacaaatactcaactcctattattattttggaccaagcaaaggagctttactttgaatccatttccgtatacgtttgataacaaacggtatcatacattagcttatcacaaccgggtgcagaattgcaagacccaaaaggccgtgatcgatgccgggctgagctgcccgaacatagacggcacgtgcggcgtgggcgggtgcatcttctgcgacggcggcagcggctattttacgcaggataaggcattttccgtcacggagcagctgcaagcggaaaaagtgcgtattcataaaaagtcgccggaaagtaaaatcatcgcgtattttcagacgcacacaaacacctacgcgccggttgaaaagctcaggacgttatacgaagaagcgcttgcattcggcgtttacggcgtatcgattgccacgcgcccggactgcatcggggaggatgttttgtcgcttttaaaagaattgaacggcaaaacgcacctcaccgtggaactgggcttgcaaagcagtaatgatgagacggctgcgcgtattcacagaggatataaatacgaggtatttagagagacgtttctgcgcctgcgcgaaaacaatattcgcgtttgcgtgcatatcatagacggcttaccgggcgagacggaggcggagatgataaagaccgccgaagaccttgcacagctgcgcccggacggtgtgaaaattcatcttttacacgtcattcgcggcacgcagcttgcgggcttatatgaaagcggcgcatacacgccgatgacgtttgaggactatgtgcacgtcgtgatccgtcaactggaggtgctgccgcccgaaacggtcatcgagcgcattacgggcgacggtgacaaaacaaagctgcttgcacccttgtggagccgcgataaaatccgcgtactcggcacgatagaccgcgagatggcagtgggaaatacttggcaaggcagactttattcgccgaatggcttgcaaaaaggacagaaaatgcgtataatagaataagtccgaacacggtgtgcagtttacgctgtgatttcgtttatgaaaggtaatcttactatgaataataaagctccaaataaacatagcgacgcgcgttcttttgaaatgcgccgtttgattttccttggcgcggccggcgtgctcattctggtcgtggtcattttatcgctcctatccgcgttcggcgggaaatccgacggtcagagcaccggcaacggcacgtcttccgcggtgacggaggacggcaagctcgtcattcaggatctttacgagggtgagatcaccattccgaagtttaatgtgccgctcaatacatacgaccagtcgaagtttaaaaatgacaacggccttgtgacgtatgacgacgcgaacgcgagcctcggcatcgacgtttccgactatcagggcgatatcgactgggcagccgtcaaagcgagcggcatcgatttcgcgatgattcgcgcaggctaccgcggtgcaacgcgcggcaagctgaacgaagacagcaagtttgccgataattacaccggtgcgaaggacgcaggcgtaaaggtgggcatctacttcttctcgcaggcaacttctgttaccgaagcggaggaggaagcgggttatgtgctccagcttttgcagaataagtccgtcgattaccccgttgtctttgactgggagcagacgagcgtagacggctctcgcacggcagatgccacgggcgagcagattacgagttatgcttcggcgttctgcaaaaagattgcgaaagcgggctacaccgcaggtgtgtattttaaccgcagccttgggtataactattacgacttagagcagctcaaggattttgagttctggctcgcggaataccgcagcgtgccggcattctactataacttcggcctgtggcagtattccgacaacgcgcaggtgcagggcatcgacgcggcagtcgatattaacgtcagctttaagaactacggctgattttaaaagtaaaaacgaaaggtgcttgatcattttggtcaggcacctttttgttattcttcgttttcgccgaaccagccgcaggctttcatgtctacgcggccgtcgggcaggaactgcacgccctcggcttcgagcttttcgcgctgtacatcggggccgccgaaaacatagcccttgcacagagagccgtctttgaacactacgcggtggcatggcgtatttacggggtccgtgttgcggtgcagcacaaagcccacgccgcgcgaggcccgcgggttgcccgctgcaaatgccacgaagccgtaatttgtcaccttgccgcgcgggatctcgcgcaccacctgaaacacgcgctcggaaaaatcgttcatcgtattcaacttcctttgctttcaaaccgttttgtacagtatagcataaaagtagtctttacaaaagggtttttattgattataatgaaatataacgaaactaaaattgaaacggagttgttgatatggctattattgaagtgaattttatctcgaagtgcctcatgcgcgtggtgacgttcaacgcaattatcccggtggataagttcggcccgcaggcggaaaacgcagagcagaagccactgaagacgctttaccttttgcacggcattttcggaaattatacggactgggtgaacggcacgcgcattcaggcgtgggcggaggcaaatgaccttgcggttatcatgccttccggtgaaaaccgcttctacctcgacgacgaaaagagcggtgaactgtacggcgagttcatcggcaaggagcttgtagagttcacaagaaagctgtttccgctttccgacaagcgcgaggacacattcatcgcgggcctttccatgggcggctacggtgcaatccgcaacggcctgaagtatgcggaaaactttggctgcgtcatcggtctttccgccgcgctcgtgcacgatacgtggaaggacgcggacaactccgcgccgatcttcacattccgccgcaactactacgaggcagttttcggtgaatatgacaaggtgaagggcagcgacaaagacccgaaggcgctgcttttgaagctgaaggaggagggcagacccgtaccgaaaatgtacctgtgctgcggcacggaggacggcctcgtcaccgcaaaccgcgatttccgcgatttcctcaacgaaaacggtgttgacctcacgtatgtggagggccccggcaagcacgactgggtattctgggatacgtacatcaaaaaggtgctcgactggctgccgcttaatagaacaggcgcgggcatcaacagcggaaacgtgaaataaagcagaacggaaaacaggggaacggatgatgcagaagaggaatctgaaaaactccgcaagatcacgatgaatgtgctaacgatgcagctcaattccatcacgatcatgaatctcatcgccgccagcttgcaaattcgtaaacataatcaaaagccaccgaaacggtgaagcgcaaggcttgccgcaaacggtggcttttactctatgaaaatttaattctgcgttttattgccgggcaggatattgaggttttccgggacattcgggtgggggatgttgtgcaacgcaaagcctgcgagctgacggatgatctgcaaaacgaacgaccgcgtttcggggccgaggtgcacggcggcgttgtagatagcgccgatgttcttttgaatgtcgccggcgtcaaatacgttttcaatattgccggcggtcaaaagaccgtagagtacatcgacaaggcgtatgcgctcgtcgatgctcatgccggtgatccagctgttgagtgttttgttcatgtattttgcgccgctggaaatttcctccagcgtatggaatgcaccgtccgtcacctgccacgagaacgggtcgtgctgcataatgcccatttggttgctttccacaacggagtatgcaccgtggttttcaagcagcatgccgatgagcgagccttttggaatgaccttatgtacgcggctttgaatgcgcccatattcttcggattcgagcgtgttgccgatgaagccggggctgtcgagcgggtagacgcgctcaatacgcttttgaatttccgggtcgcagaacatgcccgcgtaggctgcaaggttgccgcctttggagtggcccatcaaaagcagtttgccgggaaagcttttgccgagctttgtcacatagtctgccgcatcggcctgcgaggggatgacgggcagaaatgccatgttaaaatcctctttccagccgacgagcgtggcgtccgtgccgcggaatacggcgcaggcgtggtcgtcatcgagatacacggtgatggccgcaaactgctcctctgactggtcacacagcttttcaacgaagttgccgatttttatgttgcgccagcgcgggcttgacgccatagcgtacaaaagtctcatgttgcttttggtatcgcgtacatggaacatcaacttttcaaagcgctctgcctttaaaagctctcgaatttctattttgttttcgcatttaagctcgtcttcaaacgcgctcagattcatgtaggaaaactgtgataaaagcaggctgtctacatccgtaaacggtttttctgccaaaagcgagaattcggtttctgcatattcaaggatgcttggcatagtacgccgcctttctgagaaagttaaacgtaataatagggaccgggcttacagaggatgacgatgagatcgacgaacgcgccgatgccgaacaggccgccggtgaagatatacaaaacacccatgccgatctttccctcataaaatttatgcgcgccgatgagtcctaaaaacaggcacaggaaaaacgctgcccatttgctttttgccacaccaccgtaagtgacattgttgtttacataaacaggctggggctgttgggcagactgcaatggctctacctgcctgccgcacgcggggcaaatcacgcagtcggcaccgatgaccgcgccgcagtatttacagaatttcgcgttttcggtgcacgtgccgcagtttgggcaaaaaagctcaccgttcggaatatttgcaccgcaatttttgcagaccataagaaaatctcctttgcatatttgaatatttgtccaccgaaatcataacacagattttgacattccgcaacgtgtttcaccgctttttctgattgccgcgcacaaaagcagcgcgtctgtcatagtatgccgcgggacaaagcgctgtgcatgtcccaatatgcaggaaaggagggtaaaggtttgatgaaacagacggttttaaagacgacggtggccgtgctcggcgcgggactcgtgtcgtacctcggtacgctcgcggtgccgatgctcgtgttgctcggcgtgatgttgctcgattatatcaccggcataatcaaagcgtatatccgcgccgagttaaattccaagttcggtattaaggggatactcaaaaagctttgctatatggtcatggtcgcagtcggtgcggcggtggattatcttttgcgcggtgcagtcatcggggccggcatcacgctcgatgtaaagctgtttttcggcatgctcgtcaccgtgtggcttacgatcaacgagctcatttccgtcatggaaaatcttgcggccatcggcgtgccggggtttccgcgtttgcagcgcattttaaagcggctccgtcgcaccgtggcggatgaatcgggtgcaagtgatgagaagaaggagtgatcttatggtacccattcgcgaaaatctattatcttctgcaaaatacaatttgaaagtcccggtggagtcctgcgcaaaggacatgaagtacattgtcgtccacaacacggcgaacgatgcttccgccgcgaatgaagtcgcgtatatgattcgaaacgacagctctacgtcgttcaacgcggcggtcgatgacaaggagattgtcatcggcataccgctgaacagaggtgcgtttgcggcggggcagcgcgacggcaatgcacatggtattcatatcgagatttgctattcgctttcgggcggcacacgtttcgacaaagccgaaaagaacgccgcagagtatatcgcaaagcttttgaaggaacgcggttgggatacgtcccatctgaagaagcatcaggacttcgacggcaaatattgtccgcaccgcacgctcgacaagggctgggcgcggtttttaaaaatgatcgaaagcgaaatgaaagatgacaaaaagacggagacaaagaccgatgcgaaacccgtgccaaagcagctttaccgcgtgcggacaagctggtcggacgcaaaaagccagatcggcgcgtatgcaatgctggaaaacgcgaaaaacgcatgccctgtgggttataaagtgtatgcctcaaacggcaaaattgtgtatgaaccgttcaaagcgtatacagtgcgcaaggacgctgcagacccgctgaacatccgcaaaggtccgggcacgaattatgacgtgcaggggcagatcacagacacgaagcgctatacggttgtagaggagagcgcaggtgtgggttctgcaaaaggctggggacgtctcaaagccggcggctgggtggcgcttgactgggtgaaaaaagcgtagcgccgatgataaggcataatataaacagaaaacacaaaatgaatttgtgaaagcaagatattgcatttttgcgtccaatgtggtatgctgaacgtattgatgcagcacgccggtgaaactgaagggggaaaacggtttcaccggcggctgtgtttgaatattcgcagaaaataggtggagaagtaatgaagaaacatcacagtaatcgcagcatgttctcgggtaagctcgggttcgtgctgtctgcggccggcgcttcggtcggtcttggcaacatttggcgatttccgtaccttgcggcaaaatacggcggcggcattttccttttgatttacattttgcttgcgctgacgttcggttacacgatgatcgtggcagaaacatcgcttggccgcatgacgcgcaaaagccctgtgggtgcatttgcatcgttcacaaagtcgcatacattaaaagccggaggctggattaacgccattatcccaattctgattgtgccttattattccgttatcggcggctgggtcatcaaatatctttttgagtacatttgcggcaacggaacaaagcttgcggaggacggatatttttcgatgttcatctcggacggcgtgtccgccgaaatttgctttatcgtttttgcactcatcacgctgaccatcatttttgccggcgtgcgcaacggtattgagcgtgtatcgaaattcatgatgccgatccttgtcgtgttgtctgtcatcatcgcaatctattccgtcacacgtcccggcgcactgaagggcattcagtatttccttgtgccgaaccttgagaatttctcctggatgacggtcgtttccgccatgggacagatgttctattcgctgtccatcgccatgggcatccttgttacgtttggctcttatatgaagaaagaaacgtctattgagaactctacgcgcaatgtagaggttttcgacaccgccatcgccattatggccggccttatgatcatcccggcggtctttgcgttctccggcggcgacccgaacaccttgcaggcgggcccgtcattgatgttcatcacgattccgaaggtgttcgccagcatgggtctcggcacggtggttggcattttgttcttcgtgctcgtgctgtttgcggcggtcacaagctctattgcgctgacggaaagcgccgtttccacgtttgaagatgaactccattggaaccgcaaaaagtcgaccgttgtcatcggcatcatcatgctcgcgctcggcacgctgtcttcgctcggctacggcccgctcgatgccgtaaagattctcggcatgcagttcctcgatttcttcgatttcttaacgaactccgttatgatgccgattgcggctattgcgacttgcctgctcgtttcccgcgtgatcggtgtagaccgtattgaagaagaaatgacgcaaaaaggcggcacgttccgcaggaagaagatcttcgtcatgatgatcaagtatctttgcccggtctttgcagccatcatccttatcagctctgtcatgaacgcattcggcctgatctctatgtaagcattttgaccggcgcgacgaaagccgcgcacttcgatgatgccgcaaggtgtcattttaccggacgaaagaaataacagaataaaatgagcgaggccccggcgagcgttttgtcatgctcgccggggcctgtgtctgttgtgcgttatttcagaactttttcgtaggcaaagcggtctgcgccgtccgtaaggtgaatgatgccgcagcgaatgtaaccgttcttttcgagcgtgtgctgcatgatgatattgccgggatgcgtatcgcatcgcatggaggtgacacccgcttcaagcgagagtttcgcgcagtaggtcatcaaaaacgatgccgcgccgcgcttcttcgcattatttgccgccataatgcggtgcacgatgccgtagattttgttttctgtctgccacgcgccgttataaatttcgtggtatgtcggctcgtcgcccacatacacggcggcacttgcaagaatattgttttcgtcgtctatcacaacacggcagattttgttttgaatgtcctcacgcatggtgttttcgttcgggtagccgttttgccattggtcgatgccgagcgcccgcagcgaagctttcgcgttttccagcatctcaagcagatagggcaagtcacaaagctctgcatttctgatcttcattttctttcatcctttcccgttttgccgcgcagaatctgcaaaaaatcccatgtgcgcgttacaaatatgaacatatacaaaattatacgattttttgcttgccttttcaagggaaaacgtgtataatactaaagtacgcggtcaagtatgttccgcgcacggaaaaagccaaggcggttggaatataccgtggaatatgcgagcggacaggtctgcgcggcgagacaccgtgaaccatgtcaggcgggggaccgagcagcattaagcggatcgtctggtgcgatgcaggctgcctgtccgttcacatattctacgttccaatcgtctttttcttttatcacccacaaagaaaggagcgccgccgtttgtataaagcgttatacagaaaatatcgtccgcagcagttttccgatgtcgtcggtcagccgcaggtgacggtcacgttaaaaaacgaactgatggccgggcgcatttcgcacgcatatctgttcaccggctcgcgcggcacgggaaaaacgacctgcgcaaaaattctggcgaaggcggtcaattgcttggatccccaaaacggcgatccatgcggcaagtgcgatgtgtgcagaggactggatgacggctctgttttggacgttgtagagctggacgccgcgagcaacaacggcgtagacagcatccgcgcgctcattgaagaatccaacttcacgccgactacggcgaaataccgcgtatatatcatcgatgaggtgcacatgctctccgtttcagcgttcaatgccctcttaaaaacgctcgaagaacctcccgcacacgtcattttcattttggcgacgaccgaagtccataagctgttgccgacgattttatcgcgctgtcagcgttttgacttccgccgcatcgcaccggaggacatcgcagggcgccttgagtgggtctgcacgcaggaaaatgtgacaatcgaccacgatgccgcgatgcttatcgccgttacggcagacggcggcatgcgcgacgcgctttccattttggatcagtgcatcggccgcagcgacgggcacgtgacgtatgggctcgttgcggaaacggcgggccttgcggggcgtgggcacttaattgaactcgccgagtgcattcgcacgggcgaccgcaccgcggcactcgaaaagatcgacgcgctgtataagtcttccaaagacatgggcagactgtgcgaggagcttgcgggctttttccgcaatttgatgcttatcaaaacgatgaaggacgcaagcgggcttgtaaatgccgttggcgaagagctggaagccatgaccaaaacggcgctttccatggagctttcaacgattctgcacgcactcgatgcgttccagtccgcgcagtcacgcatgaagactatgaataagcgcacggaaatggaaatgacgtttatccgtctctgcacgccggaaatggatacctcgcccgcagcacttttgcgccgcattgaagctttggagcgcggcggcctgcgccgtcccatcaccccggcaccgagtgtacccgcggccgaagcaccggcagcaccggtacagcagcccgagacaccacagaacaatgcacctgtgcagcccgcggtaaaggacaagccgcagtccacagaggagcttgcaaaaaatgcgcagccgttcgacggctggtcggacattatcggctatatggaaaattactcaaagtcggtggcgtcggcattcaagggctcagcggcgtacatcagcggcgactacatgctcatcgaagcaccgcagattgcgtttgatctcttgaaacgtgccagccagagagaaaagatccgcgaggccattcagcaggtgaccgggcgtgtgtataagctcggcccttataagccgcccgcagcggacggcgaaaaaccgaaagatccgctcgacgcctttttgcacgatatgcgcgaagccggcgtggagatcgaagaaaaataaatttaaaaaccacacagtaaggagtcttaactatgaaagcacgtttaccgcagggtatgggcggcggaggagccgcaaatttgcagcagcttgcacgccaggcacagaagatgcaggagcagatggagcagattaccacggagctcgaagcgaaggaatacaccgcggccgcaggcggcggagccgtttccgcaaccgtaacgggcaaaatggaagtaaagaatatcgacatcaagccggaggttatcgatcctgatgatgccgagatgctcggcgacctcgtcgctgctgccgtcaacgaagcgctgcgcgcagccgcaaacgagaaagaggagaagcttggcgcaatctccggcggcatgagccttccgggcatcctctaatggccggttatcacgtaccgccgctcgaacggctcgtcgataaatttgagagcttgccgggcgtggggcataagtctgcacagcgcattgcgtatgctgtactcaacatggataaagcggatgccgaaagctttgcgcaggcgatcatcgacgcgcatgagcagatccattactgctccgtgtgctgcaatttgacggacggcgacctttgccccgtgtgccgcgatgaaagccgagaccgttcggttatctgcgtggtggaagacccacgcgacgtgttcgcactggagcgcacaaatgagttccatgcgacctatcacgtgctgcacggtgccatttcgccgcttggcggcatcgggccggatcagctcaaaataaaagagcttttgcgccgcgtgcaggacggcaccgtgcaggaggtcatcatggcgacgaacccgaccgttgagggcgaagcgaccgccatgtacatttcgcgcctgttaaagccgctcggtatccgcgtaacacgtcttgcgtacggcatcccggtcggcggcgacctcgaatatgccgatgaagtgacgctttcccgcgccattgagggcagacaggagctgtaaaatcgatttcgcgttgacaaaaccgcgaaagtggtgtatagtaaatcacacacaaagcagaaggaggcaggccaagtggcaaaaacagaatttaaaacgattgcccagaacaaaaaggcctaccacgactactttgtggaggagacccttgaagcgggcattgagctttgcggcacagaggtgaaatcgctgcggcagggcagatgtaacttaaaggacgcgtggtgctctgttgtggacggtgaaatgctcttaaacggctgccatatcagcccgtatgagcagggcaacatctttaaccgtgaccccatgcgggtgcgccgtttgctcatgcacaagcgcgagatcatgcggctttttggcctttccaaaaccgtcggttattcgctcattccgctttccgtgtactttaagggttcgcgggtgaaggtgcaggtcggtctgtgcaagggcaaaaagctctacgataagcgtgccgatatggccgcgcgtgatgcccaacgcgatattcagcgtgcgctgaaagagaaaaacagataaaagcggtagcaatatcgctttttatatggggatgtaaaggtttcgacggggactggaagccctggtaagcgagtagcggtgcgggaccgctataaaatccgcaaacttaaaattaaacgacaacaatacagttgctgttgctgcttaattaagcagccgttcttacccgtaggaccgcggacgggataagagcgtcacttagcggtgcacgtgaacgggtccatgcctttaagcccgtcatgatctaaaggctactgatgcgcaaagcctgctgttcggcggtgcgcggagggaatgtcaaaagagccgctacactcgtagaaagccccggtaaccggttttcggacgcgggttcgattcccgccatctccaccaaacaggtattggacgaacacctatttcttcagcggcggctttgccgtaaagtgttcgctctgatccacaacagaaaagcgccgtcttgggagtgatcccgaggcggcgctttttcttcggctggtaaagcaaatggcagatgcggagggcattacggaaacgctgaaagccaacgaccaaatggaatgggtcgggcggatgaactcctgccgagaccgtgcatccgaaactgtctgtcaccaagtgatctatacagtacgatcacacagataaatgttaatcgtattgcaagatatttttgacagtttgatatcataaacatccccatttccattatgatttttatatatttattgttgattttatcgaaagttcattgtatactacaaagttttattctatatatggacaaagaatttttatgggtgtatactattatagtatttactaaaaatatagtatttactaaaaagcaaaggaaggaggaaataatactatgcgcgatgttttgcgggaagaaaaaaaatttctgcttaatcaggcagaagcattaaaacttcggaattatttgtcaaacgtggttcatgctgacgcacataatggaccgaatggttatccggtacgttctttgtactttgattctttgtcaaatcgggattttcaggaaaaagaagatggtctggagttaagaagaaagtttcgtttgcgggtatatagtcctgatgcggattttgcactgtttgaaatgaagcagaagcagggaccttatcagcggaagcgatcattaagattatccagaagggaagcacaggctctcgttgggggcgattattctgtacttttaaacagtggcagtgagtttggacaggaatgtcattcaattatggaaatgtgggcataccgtcctaaaacagttgtagaatatgacagatttgcatttatcgcgccggaaaattctattcgaataacttttgactctggaatacgggctaatgaagtaaatttcaatatgtttgatagaaatctggtgttaaacagtgtaatgtctccttttgctacagtgttggaagttaaatataacggttttttgttaagctatatcaagcatatgcttctgcccgttcagaaaagcgagctttccgtgagcaaatactgtatggcaagacaaattggctgtaactacaaattttaggaggaatgggaatgaaagagacaatttataacctgcttacccagcagggggatatgacttggcagcaaattacaatgcatattctggtaagtgctgtcattggtctgcttatttttatttcatatgtgatctcacataagggaacgatttacagcaaaaaatttggagtaacactaatcgttctgacggttatgacaggaacagttatgactgtcataggaaacaatattgcattgtcgcttggtatggtcggtgcattatctatcgtgcgttttcgaactgcaataaaagattccagagatactgtatatattttctggacgatcattgtgggaatatgctgtggagttggagattatctggttgctgcagtaggcagttctgctatttttctgatctttcttatcatgggagcaatccgcagtgataaccgtatgcttttgatcatccgtgcaaaaagaagccgctgtgaaaatatagaatcccaggtctttcgttattttgggactggtgccgttcttcgggtaaaaaatacgacagaagagaatgctgagtacatttatgaattatccagaaaaatactgggaaaagttcagaaacagcatccggctttaacagatgatttctataaccttggacaaatcgaaagtgttaatattgtagctcaaagcgatgagatttataactgatatgaaatataaaataataggatttacatgctgctttgcggttatcctgattgctgtttttgcgccactgctttatcaggactatcaaaaaacagagagaattcaccaacatgaacaggaaattccccaggaaccatgtacggatcctgcggatggcggtctgtgtacatatcttccgattgtcaaaattgatacagatggggtggtaatcccgggaagacccattaaggatgatggaaacaaccgcatctatacatgtgctgctgatggggaaactacaattgctgctcagatggatataattggaaatgacagcaaagagtaccatcatgcaaatggaacggcagatgtatcttctgcaatccgcatacgaatgagaggtaattcctcaagagcgtttgataagccaagctatgccatcagacttgtagatgaaaaaggggaaaacaatccgctttccattatgggaatggatgcgcaccatgaatgggtattgtacggtccctggctcgataaaacagccatacgaaattatatgttttacaatcttgccggagaaatgatgtcttatgcgccaaatgtaagattctgcgaagtaattcttaatggtgaatatgaaggtctatatgtaatgactgaagtgatcaccggcggaaaagatggcgccagactgggacttcgtgtaaatgccaagcacagcacattttccggatacctgcttcgcctggatcatcagcatgcggacgaagaagctttaaacagctttacaacgtatacctacaaaacccccttccagctgcagatagaatatcccggaagcaggaacagggatgacagactgacagaagaaatccagcaggatttttcagattttgaaaaaactctgtattcatatgattatgacagggaaaaacatggctacacttctatgatagatgtagacagctttgtagattactttataatcaatgagctttccagtaatgcagatgccggaaactattccacttatatttataagggaacagataatctgtatcgtatgtgtgtatgggattttaataatgcctgcaataactatttcgaggaggaacttccttatacaggatttttcctgaacaaccgattatggtttgaaatgcttatcaaagatgaggattttacggaacggatcatccagcgctatcattccttgcgaaaaggtctgttaagtgaggaatcactttatcattatatcgatgaaacccttgattttatcgtaccagctcttgaaagaaacgatgcacgatggggaagtgtggaacagcaggcaaagggacttctggttccggtatcgagaaatttggacagcagatctgccgctgaaggacagttaaaaggttacttgcgaaacagaggagaatggctggatgaaaacattgagactctgcgccagtattcagcatcctcccgtgtaaagcagtataatgaggttaatgattaaaatatgaaacgatttattatcggcatatctgccatcattctgcttctgtttattggatttatagctgtgttttatggcggattttatgtagactcaggccgggacaatcatgtaaacacatttgttcggactgagaataaagagatacttataaaggacaaagataagtggaaaccatttgaagtcagaggaatggatatgggaagcggtgttcccggtgaatggtctacagattatgcgatcaccaaagaaacctatctgcactggtttcagctgattcaggaagcgggagcaaatacgctgagagtctattctgtccagaatccgtctttttataaagcgttctatgaatacaattcccaacatgaggagccgttatatttacttcagggaatctgggtaaatgattatatacagaactcccgagtggatgcatatgccgactcctttgcaggaaagcttctggataattgcctggtcactgtagatgtgatccatggaaaacgacttatcatcaataatgatgcagatacaagtacaggactttatttacacgatgtctcgaaatgggtgctgggatatattatcggaaatggatgggaagatacaacagttgcatatacagatgagaaatatccggatatggaaccttataaaggaacctatcttactgcttcaaaagatgcctctgcctttgaatccctgcttgcaaaaacaggtgacaggatgctgcactatgaatcaacaagatatgatgagcagcgtctgatctccttttccagtggaaatgcaacagatccctttgattatcctaaagagattgcagaatatttccgaaaatgtgcccggatcgacacagaacatataactgcaactgataaatttatatcaggtcagtttgccagctacagtgcatctccgtatgatcaggattacttttcctgtatggaatacacaacatggaacagcttgtctgataaaaagattgactttagtgactgtatcactcctgacggaaaacggaatacttatcgggcatatttaagacttttaaacgaacatcatacaatgccggttttggctgttgaattcggtgcagctacaggacgaggtgagattcaggagaatccggtgaccagcaaaggacttggatactattctgaaaaagaacagggaaagattctggtagattgttatgaagacattatggctgccggactttccggaggatgtgtctattcctggcaggatgaatggttcaagcatacctggaataccatgtatgctgtagatttaagccgtaatatttactgggaagatgcgcagacaaatgaccagcattttggcttgctggcatttgactgtggggaaaaagaaagtgtttgttacgtggacggggatacttccgaatggacggataaagatatggtgatccaatacgaagacggctctttcatcagtgtgaagtatgatgcctccgatgtttatttatatctccataaaaaggactttgatctggaaaaggacacgctgtatgttccggttgatacgacccctaaaacaggcagtacccgtatggaaaattgtacagcagaatttgaaagacctacagattttgtactgatcttaaatggaaaagataatactcgtctgttggttcaggatcggtataatcccattcatgccaattatgaggaagatattacaggagaagatccttatattgatccaccagccaaggacagcgctgtattcgaaaatatctgcatggtattacgagatgttattggtcagtatcaggatgctgccacaccgttaaaaacctttgaaagtggaaagctgcattatggtaatggaaatccatctgcatctgcttatgattccagggcagattttatctgtaacggagatgatgtggaaattagaatcccatggcagctgctgaatttttctgatccgtcccgaatgcagatccatgatgattattatgacggaaattatggcattgaagcagtgggaatcaaagagatgtttataggttttggcagtgaaggaaatacaatcgagatgggatgccttaaattgaaaggatgggagaatacagtaccctaccatgaaagattaaaagaagcataccaggttctgaagacatactggacaggaaaggaatacgaatgatagcacagcttgtgattgctttttattttattgtctgtgtggggattatcctgtttaactgctttacagagataatttcaagatatcgttcctgtgttctgaaaaggagggaacaacgatattgcgaagaatacagacagttgtttttagaaaatataacggaaaataaaaagcaggaaaaaaggctggttaaagagcttcattcaaccagtagacttctgacgttcagtgaagcattatataaagttgaaaacagtatgccggaacaattccagcagggaatagcacctgtaagtcggctgatggaagaactgataccggtttatgaaagaaaatcggatatggaaaaggcctgcttggcttatgtatttgccatatttcatatgacgaaattccagactaaggaaattgttttcccatttctttttgacctgcttggaaataaaagtctctattgcagggagaatgctttgcgggcattatacagttcagaagatatacacgcggttatgcaggcattgacatttctggatgcaaatgagcatctacttccgcatgaaaaaatacttgcagatggacttctttccttcgataaaaaagaagaactgataccactcctttgggaaaaaatgagtgaatttcatccaaggatgcaggtaagcttgttggattatattagatatgcatcgtcaaactggaaggatgaaatgctgtctatgttggaaacaagccaggatatggaaattcaaatcgcatgtgtccgctattttggcagatatcaggatgaaagaagtgttccttttttgcttcatcacgccgaagaagaaaaggaagggttctgggaattgcagaatgcctgtatttctgctcttgctgtgtatcccggactacagacactggaaatcttgaaaaaagagacttccagtaaaaactggtatgtccgtcgtaatgctgcaaaaagccttgcagttctgaatacagatagggatgcattagctgatattttacagggaaatgaccgctacgcaaaagaaatgttagagtaccagctggatgcagtaaaagcacaaaggggggcgggcttatgaccgatgcatttcgtttttttctggaatgtatcaatctgttttttattatatacctgattggatattccagctttttgtttttgtcggttgtagcaggcgcaattgagctgtacaaatcataccgccttgaacagctgcacaataaactgtggcaaagttattacataccggtttccattcttgttccggcttataacgaagaggttacggtgaaggatacagtcaattcacttctcaatctggattataaactatatgaaattatagtaatagatgatggttctaaagacaaaacatctcaggttctgattgatgcatttcatatggagcgagtggaacgcccgatccgtcatctgatccaatgccagcctgaggaagaggtttatgaatgcccgaaccagaaagtgcccattactttgatccgcaagaagaatggcggaaaagcagacagcttaaatgccggaatcaatgcagctaggtatccttggtttatctgtatggatgcggactctgttttacagtatgattcgctggagaaaatcgttcgcccggttctggaggacgaaaatgtaatagccgttggtggaagtgtccgcccagccaatggtgttgtcataaaaaaaggtcatgtgataaaatataggctgcccagaaatataatagcaagaatgcaatccctggaatatgaccgttcttttctggcagcacgtatcctgttggataaaatcaatgcaaacatgatcatatccggagcttttggattatttgagaaaaaaacagtgattgccgtaggcggatatgacaacagtacaatgggcgaggatatggaactggtagtcagacttcatgaattcagccgcatgaatcgtaagccatataagattgattttgcacaggatgccatctgctggtcgcaaactccggaaaaattaagtgaattgtgcaagcagcggaaaagatggcagagaggattgttccagtgtatgtggggacaccgtaaaatgctggcaaacccacggtacggggctgtaggacttttatcctatctttattttctgctttacgaattattgtcaccatttattgaacttttgggtgtacttacaatggttttatctgtggtgatggatatgctgaatgtgaaatttatgctggtatttcttgcctgctatgccctgtatggtattttactcacattaactgcatatttttcaagaatctataccattgaccagaggctttcttttcgagaactgatccttgctattattgcttgtttttttgaaacaacttttctccgattttatctggcatttgtccgtgcaactgcatttgtgggatacaagaagaacaaactgaactggggtaaactggaaagaaagaaaatgaacaaaatatagttttattactatgtcaatttatctaatgtgacgacaagctgatttctaacgcaaaatctgttaccataaattatccaaacgtgtcctgattcttctggctctggatgataagaaaaattccaatctgaatcatagacagattgcttccgcattgaatacaacggtaacaaccattgtagcaactgcacgcgattattttcaaaatggactggaacatatcccgctggatgctatagaaacggcatttgaaggcaaaaccggagcttcggaggggtgttcatccttgagcacccccgctccatcagaaaaaaggtctttgtcatttttgacaaagaccttttttctgtgaaattcgccttacggcgagtgaaataataacctgcggttattgtgaaattgcttcgcagtgaaatgcactgcgcgcgttaagggcgaatacacgtcaaaattgcggaaagtacatgccggatggagtaggactccaaatcgaccatattattccgatttcaaaaggcggaaaaacggttgcttctaatttgcaggtgctgtgttcaaaatgtaatggcagaaaggggaatagaagaacgacataaagaaagaacacaaatcgtgagcagttagtttaaaacgatttgtgttcttttggcttttaaattaaaatataagcttttttagtttctctcaatcatcgctctcaaaagttcaatttcggctttgtagccgggaagttcgtttggagtttcgagataaaaggggaggcggcgcaggacagggtggttgatgatgcggcggaacgcttccgtgccaatcttgccctcgccgatctttgcgtggcggtctttgtgagaggaaagcccgaagatgctgtcgttaatgtgtaccgctttcatgcggttaagcccaatcacgcggtcaaactctgtcaacacaccgtcgaggtcgtttacaatgtcatacccggcatcgaacacgtggcaggtatcgaggcacacgcccatgaggtcggagagcgttacgcggtccagaatttcacggagttcctcaaaatgagagccgacttccgtgcccttgcctgccatggtctcgagtaaaaccgtggtggtctgttcaggagataaaatggcgttcagcgtttcgctgatctgtgtgacgccggtctcgatgccttgtccaacgtggctgccggggtggaagttatagagattgtgcggtgtggcttccagacgcttcaaatcatcctgcatcgtttcgcgggcgaatgtgcgggtgtcttcgtttgcggagcagggattgatcgtatacggtgcgtgggcgagcagcacggcaaaatggttttccaccgccaactcgtttaacttctgtgcgtcgttcagatcaagcggctttgcgcggctgccgcgcgggtttcgcgtgaagaactggaacgtatctgcgccgatggaaagtgccgttttgcccatggcgtagtagcccttagaggcagaaagatgacaaccgatgtgcagcatggcttattccttggaattccagtttttgtagatctcttttgtggaacgcaccatttcctgcgcaaaatcggaaacatatttgcggttatagaacgcctttgtgcggtcgtttggcatcatttcgagcagctcttcttcagaaagctcacgataccggttctcaaacacgatggagctctttgcaaaacgagttgtctgctttctttccttttgctgctgggtgggatagccgaagaccagcatgcaaagcggagcgacctgcgggggcaggtttaaaagctctttgtgaatctcgaagttctccacaatatcgccgatatagcaggaaccgatgccgaggctttccgcggcgatgcaggctgtgtgtgcggcgatgacggcatcttccgttgcaagcaccatgttgctgagctccggcgcgggaatgtcttcgcagcccgccattttgaactttctgtaccaacggtggtaatctgcacagaaaatgagcaccattttcgcctgtgcaatgaacggctgatgatcacaggtttcagcaagcttatccttaatggactgatccgtcacgtcaatgatggagtacggcatgcagttgccgccggtcggtgcgcgcatggcagcggcgaggataatatctttgatttcgggtgtgatctccttatcctcaaaaacacggacggacttgcggttcatcaaaacctgaatcgtttcattcatttttaagaccccttccaaattgttgtaatcaagctgctaacagtatagcacaataaagcgtccgtgtaaaggagaatattgaaccgaagtgcacgggaaaacggcactatgggttgacaaatttaacagcggggttataataatatcaaagagatgtataaggagtgcggctatggaattgcatgaactgatgagaaagttacataagctggagcttgtgcagcagcttgcacatcggcgtggggcgcaggagcatggcctgtatttcggccagatgcctgtactggatttcgttgcggcaaatcccgggtgcacacaggtgcaggtggcagaccatctgcgcgtcagcccggcctccattgcactctctacaaagcgcttgcagaaggcggggtatctcacaaaagaagtggatgcagaaaacctgcgctgcaagcggctttatatctctgaagaagggcaaagggtctgtgccatgtgccgcgagcggttagaccagatcgacgcggtggcgtttcagggcttttcggaagaggagcttgaagcgttttcctcttttttggaccgcgtgacgcttaacatgacgggcgagaccgaaaatgttgtgagcggcgaattgttcggccatttgtgccgggagctcgatgccattgaaaaagaggcgaagaaaagctgattttctggtaaagttgtgttttttaccatctgatttgcaaaaaatatcaaatacattcctgcgctctttcattataataagggcgtaaacacagaggcgataccacaatgccggtcaatcgggcaaaatttcacttcgataatacatacgccggtatggatatgctgtacgggccatatgttctgtatcagattggagacttaagctgcgaagcaggttaccagacctttgagcacgagcaggcggtctatgagattacatacgtgctttccggcaccggtgcattttatgtagatgatacggtgtacaccatgcagaagggggacctgctccttgtgcgcaagggacagatgcacaacatcatctcggcggagatcgaaccgctgcgtttcttttatctcggctttgattttgtggagccgatcgtaaatgagaagattgcacagcttaagagcttttttgatacgaacgagcaggtgcagtttcataacgcggtcagcttacaggacacgttcatgcgcgtgctttccgaattcatttcggacgacgtactctcgaaccttttgattgaagcgtacatgcaggagattatctgcggcgtataccgcattttcaaccgaaagttctacaaaaactacttgctaagcggcagcaataattccgatgaaaagctcgtctacgatgtcatcaattacattgatgtgcatcttgagtccatggaaaatctcagcgcgctcagtgcggagtttgggtacagttatacccatattgcgcagaagttctctgcgtttacgggcgaaagcctgaaatcctatcacacaaagcggcgctttgaaaaatcaaacgagtatcttcgtcagggatattccgttacaaaagtcgccgagttgatgggcttcaaatcgatccatgcgttcagccgcgcctataaaaaatatgtgggcatggcgccgcgtgaatataaaaaatgggccgaggaggataaaaagaaccttccgcagcccgcagaaaattcttaaaggagttgtattccaatgaaagttgccgttattggttgcggtacgatcgcaaatgcagcacacatcccgtcttacatgaacaacccggaggcagaaatcaagtatttctgcgacatcatcccggagcgcgcacaggctgccgttgaaaagtacggctgcggcaccgctgttgtggattatcacgatgtcctggcagacccggaagttgaagctgtttccgtctgcaccccgaacaatgttcacccgaccatttccattgacgcattgcgcgcaggcaagaatgttctgtgcgagaagccggctgcaagaacctacaaggaagcccttgagatgcagaagattcagcacgagaccggcaaggtgctcaatatcggcgttgtcaaccgcttcaatgacagcgttaacctcatcaaaaagtatatcgacgacggcaagctcggcgagatctaccatgtacatgccagcttccgtgcacaccgttctattccgggcctcggcggcgcgtttaccacaaaggcgattgcaggtggcggtgctctgattgactggggcgtacattaccttgatatcgttatgtactgctgcggcgacccgaaggttaagaccgttacgggtgaagccttctgcgagcttggcaaggacatgaagggctacgcatacaccgacatgtgggcaggtcccccgaagtacgacggcacctacgacgtggacgactccgttgtcggcatgatccgtaccgaaggcccggtcatctctctgcacggcgcttgggcgcagaacatcggcgaaaacgagtgttacattgacttcatgggcgataagggtggcatccgtctccagtacggcaaggatttcaccgtttacagctccgagtacggtgcactcacggagtataagcctgtctttaagatgcgcgaccacttccagaacgagattgacgcattcatcgactgcatcaagaccggcaagaagctgccgtctcacatcgacaccgttatcatcacggcacagatgatgcaggcgatttacgattcctccgagcagcacaaagagatcacgctgggctaagctccctgtgcattaagaaaggaaattgcttatgtatcccttttctatcggcgttctgatggacggcttccgcaccgatacgctcacggctctcgataaagctgttgcagtcggcgcgaccggcattcaggtttacgcaacaagaggcgaaatggcgcccgagaatatgaacgcagaagcacgccgcgaatttttgaagcgcgtgaaggatcgcggcctgacgatctctgcgctgtgcggcgacctcggccacggcttcaacgacccgaagctgaacccggagctcattgaaaaatccaaacgcatcgtagaccttgcaaaggacctcgagaccgatgtgatcacaacgcatatcggcgttgtaccgaacgacccgagccacccgcgctatgcgatcatgcaggatgcttgcggccagcttgcggcgtatgcagactccatgcaggcacaattcgccgtggagaccggcccggagattgcaacgacgctgaaggggttccttgacagcctccattccaagggtgtttccgtcaaccttgatccggcaaactttgttatggtcacgggcgacgacccggttcaggcggtctacacgctgaaggattacattgtgcacacacatgcaaaagacggcaagcgtctgcattatgttagcccggagatcctgtacggcatggaggaatccgacatgctgaacgacgcttccttcattgagcttccgctcggcgaaggcgacgttgatttcccggcgtacttcaaggcgctgaatgacatcggctacaagggcttcctgacgatcgaacgcgaagtcggcgacgaccccgagggcgatatccgcaaggcggcagattacatccgcagcctgatctgattttaaaaagcaaagaaggagaacggtttcgaccgctctcctttttgcatcataaaagccaaaaggaggaacggaaaatggccaaaaaacgtgaggtgtgggacgcggtggacgaaaacggggaactgctcggctttgatctataccgcgatgaatggggcaaaaagcccataccggagggtgcgcaccaccgtgtggtggagattttcaccgttacaaagcagggcgaggttttgtgcacgcagcgcgacccgaaaaagcggattttcgcgctgaaatgggaggtgaccggcggctccgttgtaaaaggcgaaaaaccgcttgcaggcgcggtgcgggagcttagggaagagaccggcatcgtaaagcagccggaagagctgacctttttgctgcgtctgacgcacggcccgacggtgttttacgagtatgccgcaacggttgaaagcgcggatatcccaatcacgctgcaggcgaatgaaacgatcgattacaaatttctgccgtatgacaaattctgcgatttcatacagtccgagacgtttgccgcttcccttcgggagcgttttccggcgtatcaaaacgcgctcgaaacgtatgtaaagcaagttttgaaagacgcaacttgcaaaaaatgacggagaaaaaatcaattattcatttgtgcgctttcctgttgaattttggtgtttgctgtgttaaaatctcagacggactaaaaacaggcggcttgcctgcaatgaggaaagttggcgtagtatgaataacccaatccaaaacgttaaagaaaagcttacaaagcaaaatttaaagacatttttgctcatcacgtttggcacctttatttttgccatcggcatttatttctttaaatttccgaataatttctccaccggcggcgtgagcggtatctctattctgctcggtcgtatttttccgtcgttctccacggcggatatcatgtggattatcaatatcatcctgcttatcgtcggttttatcattttaggacgcggtttcggtgtgcttaccgtgtattgcagcatgctgctttcgtttttgacgtggctgtttgaaaaggtcattccgctttccaagccgctcaccgatcagccgttcctcgagctgtgctacggcatgatgctgccggcggtcggctcggcgatcctctttaattgcaacgcttcgagcggcggcacggatattgttgcgatgatcctcaaaaagtacacgagtcttgatatcggcaaagcgctgctcgtcagcgatgcgctcatcgcattttccgcgacgtttgtattcgatatccgcacaggcctgttttcgctgctcggtcttgctatcaaagcgttcatggtcgattccgtgattgaaggtattaacctctgcaaatatttctccattgtcaccacgcacccggaggagatttgcgattacatcattcacaagatgaaccgcagctcgaccattgtggatgccacaggcgcgtattcgcatgagggctgcaaggtcgttatggttgcgtgcagacgcggtgaagctgtgaagctccgcgcgtatgtccgttccatcgataaaaaggcatttatgtttatcacgaatacgagcgagatcatcggcaagggcttccgttctgttgaatgaccgtacataaaagtttttggcagcgcatcgtttcggtgtgctgcttttttacaggcgaaaatttaatttagtgttgacttaattaaaattcgtgctataatttaatttagcaaatacttaatcaggaggacgctatggggtcaacggctatgatgttcaaagcactggcagatgaaaaccgccttttgctgctgcgccttttgctgcgccgcaactgttgcgtgcgcgcactggcaagacagctggatatttcggaagcggcggtttcacagcatttaaaagttctgcgtgaagcggggctcattttcggcgaaaagtgcggttatttcatgcactacaccgtcaatcgcgcggcgcttaaagaactcagcagccagctctctcgcatggcgttttctgcagagcagttgccctgcacaccgcagcatggcgggtgcagccgtgcggaatatgacaaatgccgaaacgcggcacagccgcagacggagcatattctgcacgtagcagaaaataggatatttgatttgaaaggaagcatgaacatgaaaatcgcggtaacgtatcagaacggactggttttccagcatttcggccattccgaagcatttaagatctatgagattgagaacggcgaagttaaaaatgcagaggtcgcgcccacaaacggcagcggccacggtgcactggctggctttttgaagcagcacggcgtgaatgcgcttatctgcggcggcatcggcggcggtgcgcgcacggcgcttgcagaagcgggcatcgagttgtatcccggtgtttccggcagcgcggacgcggcggtcaattcgctgctgaacggcacactgctctataacccggataccgtctgtgcacaccatcaccacgagggcggtcatgactgcggcagccatagctgcggggaagataagcacggctgcgcgggcaatcattgatttaccggaagggtcatttcggcatttgctgcgatgacctttctttttctttacaaaccgcgaaactgtttgaaaacacgtgatttctgtgttatactatacgcagagtttgaaatttatctacgggaggacaagcatgtcgaatccgtacagagaggaatttatctccatttatacacagaatatcacgcgcgagggctcgcagaagcttttggcgtggctagataccaccgatttttacaccgcgccggcaagcacaaagttccactgtgcctgcgaaagcggccttgtgatgcacagcctgaatgtctacaaggcgatgcgcgagcgttggtttgacgagggcgacagtgaagaaagctttgcgatatgtgcgctgctgcatgacgtgtgcaaatcgcagttttataagacctccacgcgcaacgtgaaaaatgacgagaccgggcagtgggaaaagcgtccgttttacacggtagacgatgcattcccgttcggtcacggtgaaaaatccgtttacctcatcgagcgttttatgcgtctaaagcctgtggaggccatggcaatccgctggcacatgggtggctttgacgacgcggcgaagggcggcagctttgccatcagcctggcatttgaccgctatccgctcgccgtgaagctgcacatggctgatttggaatcaacctatctgcgcgaaaaaggcacctccgatgtgcgctgagaggcggtgagcagatgattgcgatacaaattgcaaatttaacgaaaaaatacggcgacatcattgcgataaatggcgtggaccttgaagtggaagccggggagatcgtcggctgcctcggcccggagagatccggcaaaacgacgctgctgcgccttttaacgggtcttgtgcgcccgacgctcggcgacagcacagtgctgggactttcttctgtgaaagagagtcgcaaactgcgcgcgaaaagcggtatcgttaccgatacggcggcctgcattggcagcatgagcgctctggaaaacctgctgatgttcgcttccatgtatggcatgcgcaaggagcaagcccgtacacatgcggcgcagcttttgaagaagcttgacctttggaacgcgcgtgaccgcaaggtctacacgttttccacagagatgtgccgccggttatcgctggcgcgtgcgcttgtgcatcacccgcagatcgtgttttcggacggtttgcccggcggcgagcaagcggtatcggacgcaatggtgctgcgtacactttcggattacgcaaaggaaactggcgccacggtgttgctttgcaccgatcatcttgaaagcgcggaggagatctgcacaagctttgcggtgctggagcacggctttttacgggcgagcggcgacctttcgatgcttacggccgcttctgaattgacgcctatggcggtaatccgcgtgagcgacacgcagaagatgccggcgaacttcacactgcatgatggcgcgtgggaaaagccaatcaaatccgaagccgatatgccggagcttatttccgggcttgtgcgggagaatgtcggcatttacgaagcatccgtgtgtacgcccacattgcaggatgtttattacgcgtttgtgaaaaagccgggagaggagacaccgcatgaagaagctgttttataagctgttttccaaagcggaacgtgcactcatgatgaaggacctttccgctttgtgccgccgcaggctgatcttgacgttgctcatcgcactgccgctcgtttttgcggtggcgttcccgcttttgttcctgttcgtttccgctatggtctcaccggaatcctccggtgtggagcagtttaaaaacctgctcgataacattccgcaggggacggacgagcgcgcgcagatgttctacattttcacggcgtttatctcgccgatgctgtttatgctcattccgcttttatcggcaatcattacggcttcgtacacgtttgcgggcgagcgggcacacggcacaatggaaacgcttctgtttgcgccgttcagcgtgcgccgctttttgcaggtgaaggcggcaagcagtgttttggcttccgggcttgtcacgacggtttcgtttattctgttctttgtcgtcacggctatcggtgatatggttttgaaagcgccgtttttctttgacctttcatggttcgttctggtgtttttgctctcgccggccatcacggtgctgggcgttacgtttgctgcgatgctgaccgtgaaagcacgctccacagcggaatccattcaaatttccggctatatcgtgctgccgattttgctcattttcatcgggcagatcatgggcctgtatcgcttaaacagtattgcgcttttgattttgacagcgatcatcgttgggatcgacctgtgtttattcaacttcgggttccggcgcttcacagccgaaaagctgctgacgcgtccgccggaaaagccgcgaaaggagaaaaccaatgtctattgacctgcactgccacacaagatattcggacggctccacgccgcttgaagagcttatacagcttgctgcgctccgcggcgtgacgacgttcgcgctcaccgaccacgataccatggcgggctgcgaatgcgcgttggagcttgggcgggaagcgggcgtgacggtgattcccggcgtggaaatttctgctgcagacccgaagcgtcacggcaaagcgcatatcctgtgctataagccgaagaagcccgaagtgttgctgccgctgctgcaaaaaacgacggacagccgccatgcggcgatgctacgctccgttgataaagtctgccgcttgtatgcgattccgcacgagatgattctgcgccgcgcggagggctcgacgaatatctacaagcagcacgttttgcaggcgttaatggacgccggctacgcgagtgagatgttcggcgaggtttttaagaagctctatgattccaaaacgggcatcgcctacgagaaggtggattatcccgacatcgataccgtgatggatgcggttgacgccgcagagggcatcgcggtcttggcgcacccgagcgaataccacagcatggatcttctgcgcgagctgtgcagaaatcaccgcatccgcggcattgaagtttatcacccgcgcaacacggaggaggataaagcggaaatgttgcgcttagccgaaaagtatgaccttgccgtcaccggcggcacggattatcacggcttttacacgacaaagaaaaatccggtcggcacgttcacgacggccgaatccgaatttgataaattattttctgaatgaaagggaaatgcaaaatgaagtatgatttcacaccgaaaggtgtatgttccagaggcattcatgtagagcttgacggcgacgttatccgctccgtgaaattcgacggcggctgtaacggcaatacgcagggcgtggcagcgcttgcggtcggcatgaccgttgacgaatacgtaaagcgctgcaagggcatcaagtgcggctttaagaacacctcctgcccggatcagctcgcgctcgcactggaagaagcgcttgcagagcagaagaaggcataagtaatttgctcaagagaaattacccggagagaaacgctttccgggtttttctctgtttgggcttgatttttcctcagaatacggtataatagtttagtcaacaaaatatgcgggtatggcggaattggcagacgcgccagatttaggttctggtacttcggtgtgcaggttcaagtcctgttacccgcaccatcaagaggctataaaaaagatatagcccgtggaaatcctgattttatcggggtttccaccgttttatacggcaaaattttagcgaccgattttgtagatgtaaatcggtcgttttccctttatataaggttttgaactctcacacaaccgaacacccgatacgcaggcagatagaaatcaaaaatctataagtaaaacaacctttttgcagctaaagcacacaatgaacggaggtgaaatactgtgcagcttctttatggcgtacctgaagatattgaaaaattgtagagaaatcggtctcgataaactactcataacctgtattgacggcaatattggcagtgagaaaacgatacgtaataatggtggcgtttacgaatctaccgtatatgaatcaggcaaaaattgtagcttgaagagattctggacaaccctataactgaagtaataattggtgaaagatatgaatcgactacttatagttgacggcagcaatctactgttccaaatgtttttcggaatgccgtcgagaataacaaattcagaaggaaaagcaatccaaggcacccttggatttgttggtgcgctgctcaagatcatccgcagaaccgaaccgacacacattgcggttttatttgatggtgaacacgagaatgaacgtaccgagctgaacgccgactataaggcaaaccgagttgattacagtcagacacctgaggaaaattcaccgttctcacaacttcctgatgtgtacgctgcactcgattatatgggcatcaagcatacagagaccacagtttgtgaaaccgatgactggattgcaggctatgctcatgcatacggtgataacaccgaagtaatagttgcttcctttgacagcgacttcttccagctcatcaccgagaacgtatccattctcagatatcggggcgataatactgttatctgtactcctgcgtacctgagggagaaattcggcattgaaccgagtcagtatgcagacttcaaatcccttaccggcgattcttccgataacattaaaggcgccgataaagttggacccaagacagcatcttctctgctaagtgagtttggcaatcttgagaatataattctgaatgcggcaccaataaagaaaccatccatacgagagtctattatcagaaatgctgacagactcagaacaaattataagcttataaaacttgaaggtacggtaccgttgccatttactatgaaggaacttccgtacacatatgacggtattactaccaacgaggttttgaaaggtataggtgtcaaatgaaactgatactttcatcttgcgattttcgcaatgacaatgcaagaaaaactataatagataatttgagcaagcccataagccaatgtaagctcctgtacattcctaatgagaaagctacatttgagactataaatgatgcggagttgtccgccgccgaatatgcgcggcttgccgaacggggatatatttcgttcattacattcttaaacggggcaatctcgttttctccctcatcgctgtcaactaaatcgttgattgctatgaaccgaacattatgatccggaaaatagatgtccgtgtattgcccgacggtaacatagtcgcgcccaagtcgggatagatccttgacgataaccgtggatacatagcccatttcaatatcgtcaagcattgcctgaaagccggggcgatcaaaccgagtgtccgtgataccgtcatctacataaaaacgagtgttcgaaaatccgttttctttggcatacttcgtgagcattttgcgctgattgacaatggagttactgtcgccgtctcctccgtcgtcacgggacagacggcaataaagcgccgttatccctgtttgttcgcttttctttttcgactgcataagtcctccttcccggcagtcgaacacacatattccgctgccattttatcgctgaaaatttcgccggtcaaatctgtgaaatcaccggtgatcgtccgttcaaagcgatttttaattgttacgccggatattttcggctgaaactctgaaagtaccgtaaaagtcacattgccgattttgtattcgtgcggattgccgtcggatatgccgacgatccaatttgtttgatttttcattgtcgagtcctccttacctttcgtcccgattacgctgacggattaagaatttgcggtaatgctcgcaagctttgaggataaaatcctcaagttgtttcgcatcagcgttcggcgcgtattttcgtagtttttcggttgagattttaatggtttccctctgatttgccttttcacgagagagaatttcgctaatattatcagccgtgagatttccatcctgatacctttttttcatttcaacggcttgtgcataggacggcgtgcaatcgttcacttcgcattgctccaagacggcatattgttctttgtcgccgagataggacaaagcctcgccgaccataagagcaattttgccctcgtccatcaggtcaagcagttcggggataaggtgggtcaggcggatatatcgcttaacggtatccttgctgattccttcttgctctccgattacctccgtggacaacttcggtgcaatttgctccgaagttatgtctgttctttgtccctgatgcttcatggcatcagctttcaacttatacgcaaacgccctttcggatggcagaatatgcccccggtggaggttgctgttcaccacagcaatggcggcagcatcccggtcgagggcataaattaaggcagggacctcggtgatccctgccttttgtgctgcgtgtaagcggcggtggccgcttacgacttcatattcctctgtattttctattggtcggacgatcagcggcgagagaacgccttgcgtctgtatgctttcgatcagcgtgttcatctcgtcatcgtccctgaccttgaacgggtgtccggcaaagggacgcaatttttctaccggaattgccaccggctttttcatcgtatttttcattttatctacctctttctttgtatcttgcacgggcttttttctccagctcgtgctcttgttttaacagttcatacaggtgcggggatttctctaaaatccgctccgcacggcgcagacgctcccttacgggcttcatctgcttggataccgccttgcggcattccttgttttgtgcctgttcctccggcgacttggggcggcggatgcggttgctgatgccgctgcgctcacgctccaaggcggaaagctcagacttggattgctcaatatttgcttggaggtcggttaccgtatggataccgtgctcctgtaagaagtgatagtcggcaaccagctccttcaagtccttttccgccgcccgcagatccggcgacagcagcattacatcggcaagctcggctacaatttgaacgacggtgataatgatataaaaaagcgtatcaaccaaaacggcggcggtgtcatagctgtgttcaatggagaaccccagctttcgcagctcgtcctccagcggaaatttcttcggcttgtacggcggtcggtattccaaggtaaatagccgataccgattttcggcgttctgccgcagctgtgcgttgacatggtctttggaaaagccgatgttactcagccgcacggcacgctcccaatgcttcgccttgactgaaaagcgcacagggtcaagggtgtatccaagcgcataaagctgactttcaaattctcttgggctggtcgcaaaggacaggcagtattccacatcctcccgcagatagtcccgatgcgttttcttgccggccttgtgaacccaatattctttctttttgcccttactgtaaaactcgctgttttccagcacagacagctcgtgctcccggcagatttcatcggagattctacgcagctccttgtggtcgccgattttgtttttgaactttgcgccgtccttgaaggacacgggattcacgacaaagtggcaatgcacattgtcggtattcagatggacgctgaccagcacctgataccggggtctcgcctgccggctcggtcggtgcttctgattgctgttgcaatcagaagtctccgccggagacccgcacccccacatctttcttgcggtttccttgccaatggcaaacgcctgctccggcgtgacctcgccctcacgaaagctctgaatgccgtggtaacccgccaccttgccacgcagtccgaaccgccgctgtacggcgatcatctcagcgtaggcattctgcgccgagcagttgatgccgcccacaaacatttttcggtcggtcttatcgtcgttctctgcatagcgcagagcggcgtacagatcctcgtccagatattccagggcggtagtcttgtcgggattgtcggcgtagtacagcgtggctttcagatttttgaacacaggccagaagcctgtcaccgccataacgcatcacccccttcccggcagcagaaactcagctgtgatctgtttcagcaccgcacagattttctcgtcaagctccggtgagctgtctttatccgcaagctcacccagcttttcaaggcaagcaaaaagagcgtcaggcggaaccgttctcggctcgtaccccaacgctctttgcttgacatattctgttgttgaaagcccgcactttcgagctttggcttggattttatccttttctcttgccgtgacacgcacagctattcgtatatctttccccatacgcatcgctcctttccgggggattggaggctgcgcccccaaagagtcagccgttttcggctgtgattgggacttttgcggcacacaaagtccctgcttgctataccgtaggacgcactccgcagggcataaagaaaagtggatgtcaggtaccgagatttcagcgaatttctacgctgcacgataccgaaaaccacttttttgccccttgggatacatcttttctttgagccaaagtggctctggctctgcttcaaatgctgcgatttgagccacatctcggcattttggctcagccgaacatttcaaggtcatccagcacactcttttcgtttttagcttgctgctcctcggtcagctccggttgtgcctgctcaaaaacaggagatgccgcagcaaacgacacctcctgcagttcctcccgtatgacctgccgaatatcctccaataaaaagctgcttgcggatgactgccgctgcatttcgtttaagaccgccgttaccataaaagcgttgcgggatttatccagcgactgtaaatacagtgcggctttcgcctcttttggattgtccaaatcaaaccgcacattgatccgatatttgctcatctcttcgcctcagccttcatctgcgtctcggacagatattcaaatccctttgcggcggcgcagatgtcctcgacgaatttcacacggtcagtgctgaacttataaaagttcttcacaaggcaaccgcctccgccggtcacatacaaggtcatcgtgttctcatcatagccgtgctcacgcagcctgcggaagatgtcccgcacatactcggcggcgacaatcttgatgattttcaggtcggcaggcgcaatatttgccgtgccggtgatcagcacctcgtcgatgatggcgtcgttgatctcccgctgcgttttctgcataaacgcctcccggacagcaagcgtacactggtaagtcccgaatttctcggtgaacattttgccctgctgcggcttgccgttgatcatatacagcgtgttcattgttccgttgccgatgtcgccaatcaggttgacaccttttagtgtggtggcaaagctggcaatagcggcgtacccctgcggataaatgcgcacatcatcaatataaaggtggtagtctgcctttttgtaagtgaactccacctcggcgttcttcatcagatacgccttgaaatctgccttttgtccgcttgtccaggtcagcggcagaccggcggcaagcacaatgtgcgcctcggtgagattttcggctttcagctccttggcaaccgccgcaagggtcagcacatagtagttctcatccttgatcttgtccggcgcaaactccttgtgcccctcgccgataagataatacctgccgttatagaccagcatatctgccgtgaataacggttcgtgatcgtaggcggtgatgccggtggaaaagcagcagttggccgttttcatattcccgtacccgtggtcaatgccgatgatttttgtgttgtggatcgttttcatcataagtcctttcctgcgcatagcgcatttcaaaatatttcggataactcttttttgggcggctatccattaatcccgttttgccataagatttctgtgtacagttccttttcagccggtaataccgctttcagaaaatagttgcagtagataccgtaccgagaaatgagctgtacgcactttgtttcttcgccgtcgtccagcagcagacagtctcccttgtggcaattacagcaagctttgcacacaaggacattgatttttgcccgttgccttggcgtaattctgaataccatagactaaacctccttcctgttttacgggcagcaaaaaagccgccgagtgtaacctcgacggctcgattactgccttctgtatattgaatgggggaaacggctgaaaaaggtatgtttatagcaacacggctaaaatgctgtccgcaacatcgggaaaaagccttgaatatcaggcacttttctgctacaattatatagaacaaatgtttctgtttgacgattcggagaaaaaacatcttggctttttatcgccgcaagaccggtttatgggacacttggcttgatagaatatagacggaggcgagatgtatgagcgatggacttggctttcttactgccgtttaccgggacggtcgtgtacatataggcggcaaaagctacccggcaggaacctttgcggtgcagcttttgaatcagtattataaggatgacacggcggcgaggatcgccgtgttccggcaaagtaactggaatgtgcaggagcagctatgcgccggatatctgaacgaaacagattttattaaggccggaaaggagattctgacaattctgcaaaccctgccgaagctaaagcctttttcctccttggacattgcggcggagaagcagcgaattgcagagctattcacgggaggcaacgctgctgccctttccgactatctgcggcgccgggcagcaatagcacaattcgatggtgtgttctctcccgaatacgataaggctctatttaaaaatggtgaaacgatgtgcgcaaccgttttaagtgctctccgcttttatgatgctatcccggaggatatgcgcaaggcttttgaacagctcaagaaattcgtttcccgtatggacgaagccgaccgctttgacgagcggcatttgctgcccattgctacggagatattcgggacgaattcatttccgctgcgcacggaatatattgctctcccgaaacggcgaaacagtcgcatccttgtcactgcccgaagaatgacctttgagagctattacagctttgtgctgatagatttctttgaagggctgcaccacgggcactatccaaggcagtgcgaggtttgcaagcagtatttcctgatgcaaagcgcacggcggcagaaatactgcacccatggcacggcacctgaattgtacaacggtgaaaagatcagctgccgccggtacgccatcattcagggcaaagcggagcgggcaaaggataacccgctgaaggccgcctatgaccgccgttgctcgacgatccgctccgaaaagagccggggaacgatctctgccgagtttgcgcaggcggcgcaggaaatggcaaaacgccgcttggaacaggcagaggaagatgatgcctacgcaaaagcaaattactttaccgatttggagcgtactaagctgtacgctgacacggtcaaaagaatgaaatgacaggaggtgcatccggtgtccaaagaacagaatgaagttttagagcaacagcggtaccttttggagcgccggatgtaccgccttgaccctgcgccgccgaaactgccagcccaggaatacattgtccactatctcaccgaaaaagaggaaaagtatctggcttggtatctgcacgatcaggagcctgcgcttaataagctggcgcaggccgcctgcgaacgatacgctatggcggagcattttgcggacatcaagcaagcggcggtgtgcggtatcctggccgcccttcaaaagtacgatccgactatcggcgcaccgtttgccgcttttcaaaagcggtatatgcaggacggcgtaggtgactatatccgcacggcgcaaagcggtgttatcatgatgacggcagatacttatcccgtcctgcggcgtattatggcaatctatcaccggaacggcgatgattgcagtgacagctgcatccagcgaattgccgatgaaaccggaatgggaaaaaagagcgtccgcaagtacattgcgataggcacgctgaatgaatgccgagtagatttttaccggcagtacgatgaggacggcgaggaaacggcggaggacatttcggtggacaccacctcgcagccggacaagctgtattttcgggcggtgctatatgacgcactgcacgaggcttacggcagcctgacctaccgggaacagcgcacggttgccaagcatttgggcttctgcgatacctgctggtcggtcaggaaagcggtgctgataaacggtgaaatcgagtacaggcccataaggcccatgacctttgaagaaatctcccactccaccagccgcaggtccgataaggcctccgagcggacatacaataacgctttagagaaaatgcggaaagctctgctttcctatcttgaactgtggcaataaatcaaaccatataaacgcaaaaagccccgatgagtacagagaaaatctgaaactcatcggggccttcgtttatatccgcacattcgattcttgtcactgctttttctacaatgaacggtgacaatttttgttttcatacttttcgagtagaatattaaaaaatgctcggaggtaaatagtccagcagcttttcttgcccgtccatcctgatacccccgtcagattgattttttccatgataccatatctgggagtatggagccagagaaaccggcgattttctgctggtaaattctacgcatttagagcggcactatggcggggataggataaaacactcacataccccgccgactatgcgggaaaaaccttgaaatatagggctttttaaggccctaaatgcgtaggttggtgctttgttgcgatatgctccacggttacggtgtattgttcatattctgttttcgggaatctttatgaaatcttcaaaattgcccggtatgctatccgtaaaatcaaagaaaggacttgattatatggatatgattttgaaaacgactgacctctgcaaaaatttcaaggggcaaatggcggtaaacaatgtgtcactgaacatccggcgcaactcggtttatggtctgctggggccgaatggggctggcaaatccacgatcttaaaaatgctcaccggcattttgcgccccacatcgggaagcatcgagtttgacggccacccgtggaagcggaatgatctggagcatatcggtgctttgattgagatgcccccgatttacgaaaatctgactgcatacgaaaatctcaaagtcagaactacattgctcggcctggacgatgcacgaattaacgaggtattgcaaattgtccagctcacgaataccggcaagaaacgggccgggcagttttctcttggtatgaagcagcggcttggtattgctattgcattgctcaacagtccccagcttttgattctggatgaaccgactaacggccttgaccctttagggattgaggaacttcgagagttaattcgctcttttccctgcaaagggattacagttattttgtccagccatattctgtcagaagtccagcagattgcagatcatgtgggtatcattgctggcggcgtccttggatatgagggagagcttcgcgccggtgaagatttggaacaactctttatggatgttattcgcagaaatggtaaggagggatattaaatggagatggcatatattcaggcagagaacctaaagcataagagaactttcacaaaaacgctgatcgttctggccccgtttgtaactgcgcttatgaacttttttgcccctctttggttccagctcaattcttataattggtggtatatcctgctttatcctggattccttacgctcatctgtgccttgattgaacagcgggataatggcaaactaaaatatcgtgccattgcttcattgcctgtttcgcagaacaaagtctggaaagcaaaaattggagtggccggtatttactcctgtgtggggaatttcattttcctggcgctaaatctgttgggcggttttgcaatattagttatcaacgaaattcccctgacaatcggaatttggcaggctgcggccggaacagcttgtattgtcattgcaagcctatgggaagttccgctgtgcttatggttatcaaaaaaagttggtatctttgtcacggttattcttaatgccggacttggaagcgttttagggattttcacggctacaacctctttgtggatgatctgcccgtatagctgggtgccgcatcttatgatttccgtgttaggtattttgcctaatggtgagccggttgcagatcagagtacggcaatggcattttggatgattatacttgtattggtcatttcgctggcctggtttgcggcgctgtcatttttaactgcaagatggtttgagaaaaaggaggtggggtaactatggtatctgtggttcgctgctggaaagcagaatatcagaagtgtaaacatagcattttgctctatatgcacagtatgattccaattatatgtgcggcgatttttgcgggttactatcatatatccagatgggaactggcaaccaaaatcagtgcctatctggaagtgttggccgttgcgttcccgtttctgatcggcattattgtgggcctggttgttcagatcgaaaatcaggccgggcattatcagcttttgttgggaacaatcccatctcgcatggcaacgtatattggtaaacttggttttctgatgacctgtgcttttggcgcaacatttttagcgttaggaacattcgctgcactatatagggatgctccggcaagcctttacctgaaagcagggattctattgttgattaccatgcttcccatttacctgattcatttgtttgtgggaatgagcttcggaaaaggtgcatctatgggattgggaattgcagggagtttaatagctgcccttatgataacagggcttggtgacgctacatggaaatatattccctgggcctggggcgttcgtgctatggattacactgtgcttgcatggaatagcccccagctgtatgcacaggtaaaaaccgattttttcagcggtatgattatttctgtatgctgcactgtttgtctgctgattgccagtttggtttggtttcatggttgggagggaggtaaaaacagtgaataaaaagtgcctgtttgccgtggtaattgtgcttgtaagtcttatatgcttatcggcctgcggtgcgctccgcgataccgccgataaaaataaggcgttaaatgaatctctgccgtattatgagctgaacgccgcaaactatgatgaaatttcatataacggcctgacatataccataacggatgaatgtcttgaaatgtcagaactgcaagaagaaatcgggcaggtatcgaaacgcttcaaaaatgtggcgggggaagatttcagtttcggctacgtttacagtattgtggatgtggatataagcaatgccgtagctgtaaatatcaacaatgaatatcggaaagctgacattaaaaataatgatgagtaacctcgacaatgtggtataatggggcgggaggtgattttttgacccacttacttgtagttgacgatgaagtttctatcttggaattgattaagaacagtttggggaaagatggatatttgataacagtctgtcaaaatgcggatgatgtagacatcaaaaagctgcatttctatgacctcattcttttggatgtgatgatgcctggcacagacgggtttgagttttgcaaacagatcaggaatatggtagactgcccgattctctttctgaccgcaaagacattagaggaagatatattgtttggattgggcatcggtgcggatgattatattacgaaaccttttcgtattcaggagcttcgcgcccgtgtcgcggcacatttacgcagagaaaaaagggagcatcacagcacactttcatttgagtctgatataagatttgacctttccgcaaaggtactgtatgtttcagaacagccggttccccttaccaaaagcgagtattcaatctgtgaataccttgcgaaaaaccggggacaggtttttacaaaagaacaaatctatgaagccgttttcgggtttgatggaataggcgataactctacgatctcaacgcatataaaaaatattcgtgcgaaattggagcatttcaaaataagtccgatcagcactgtatgggggataggatataaatgggagtgaaaaagaaacctacattgaaaatattgtttcgccagtttgctatctccctcattgtcatgctggtagcggcaattattgtcccttctggtttggagggacttgctgtaaatgctggattagctacaagagcaaatctaagtgaattgcaggtaaaagagatcattccaacgctgacgattgccccggatattacaaaggttgtgattccacagggatgcggctacttaattctggacaagaactttaatgagctttacagcaatatggacgatgatgaaaaagaaattgccctgctgtacgcaaagggagaatatattgaatatgctacggggaggcagtttgcacttgttgtccgggaaaacgaattttgcgttttaaggtattatattggttctcaatttacagtgtcatggctaccggaatattttccatctcctgacacgcttgcgcttatcctgatggctgtaaattcgctgctggtcattatcatactgaccgccagatttgctaagaacctgcgtacacaactgaccccgctttttgaagcaactgcggaggtttcaaagcaaaaccttgattttgaagtaggacacgccaaaatcaaagagtttgaagatgtccttgcatctttttcagatatgaaagataatctgaaaatttcgttagaacggcaatggaaaaccgaacagacacagaaagagcaaatcgccgcgcttgcccatgatttgaaaacgcctctgacggttattcaaggaaatgctgatttactcacagaaacaaatcttgatgatgagcaacgattatacgctggttacgtcgtggaaagctccggccagatgcagtcatatattcaaaccctgattgatatatcacgggcggcggttggttatcagctccatattgaaagtatagacttgccagcgttcatgcagcacttgttcggttatatggaatcactatgccggacaaaagaaatccggctgcaaatgaatactgtttcactccctcaaatgctgaaatttgatagggtgctgatagaacgtgctattatgaatgttatcagtaatgggctggactactccccgcaaggcggaacgctttatgtggatgttcagagtaacaacggtttcgtggaaatttcagtcacagacgagggaacggggttttctaaagaggcattatgccacgcacaggaacggttctatatgggcgatcaaagccgcaattcaaagttacactttggtatgggtctatatattacaaattcgattatggaacaacataatggtcagcttattttagaaaattcaaaagaaaccggcggcgcaaaggttactatgaaacttccttgctgattttccgatagtgtaatggacgtcttttatgtccgtccatttttcaaatctttatggaatcttcaaaaattcctcttatcatgtatctaaagaaaaaacatctgcccagcggcagaaaagaaaaaaaccgctgctgggcagacccattttcacgcttaatttatattcactggtggcggttttgagaaatcaaggccgctgctttctttctgtcattcccagcagttaaaggcatggcggcccacgggaggacgccgccatggacagctatgaggcgtttatcgatgaatatgttacgcttatgaaaaaatacagtgacaatccgagcgatgtcagcctgcttgccgattatacaaagtatatgagcaagtatgctgatatggtcgagaaatttgacaagtgggaaagtgaagatctgaatgacgcagagcttgcttactatattgatgtacaggcaagagttagcaagaaacttcttgaggttgcaggctgagaattgttccacgcagcacaagtgatataatacccaaaaacagaggtcgatacctccaaaaaggcatcgacctctgttttttatatgagtataagttcattgttcacaatttcagttacacggtctcgaatactgttcatccgcccgacccatttcatttggtcgcaagctttcagtttttctgtaatgccatctgcatctgccatttgctttaccagccggagaaaaagttcttccgcttgccggtcaatatctgcgagataggcattcatttttccgctggtcagcaggttggcatatcgcacacggtgatgctccttgagataacgaagatgtcgctgcccccatattccgattggcttctgttcttcctccggctcatcatctccggtgataaggtaatagtcaccgaccaactcatatctcagtcccgtgcgttcgtctgtaatatacttttccataaaaactgcctccttaatgttttgtattataatcatagcaaagaggaagtaaatcggcaaatgtacggggaaatatgtgagctttcagccggattttcaatatggattttaggttggttatgaacatccgcaccataatcggacaccaattgtgatacaataggtatcatgattggtgttcatttttctcaataaatgtgtaggagggaataaagtgaaattaaatgctgcgataaaaaatatgactacccaaattgccgatgttctttcgcttaacgatccttctgtttacatttatggttcttatgtgttagatgattttcaatacggctggagcgacatagatattctcgttctaacccaaaagtctatttccgaacaacaggctaatgaacttgtttgcctccggcagagtattactgccgccgagtccgataatccgttttaccgttgctttgagggtggcatgttgacactaaacgcatttattcgcaaggttccggatagagttgtctattggggaacaagtggacaaagaattactgacagctatcattttgatgcgtgttgcatgaaagaactgcttgactacagccgtctcttgcatggaaaagacatacggggacaattgactccgccttcttttgaggacataaaaacaaatatacaatttcattacgatacgattcgaaaatatgcaagcagtaccggacgaagtatctattcttttggttggcttttggatattgccagatgcatttacacacttcgtaccggaaaaatcatttccaaaacggctgccggagagtgggcattgcaaaactgtttattccacaacatcaccgcacttgaaaccgccttagaggttagaaaaaatccgcaaaaatatttggaaagtgccgagctgcaggctttgtcggggaagctaggaaatgctatacagcagtatgcggacgtgcttgagaaggaattaaaaaccacatcatttgttggggtgtgcactttttaacggtactcggcaccttttaacgaaaggtcgtaaggggtgtgcattttgtatcaaagtaggtcactattttcataaaaacgagtgtattcagcggctttggcttttgtgttcactcgttttttatatgccatatatatgacacgatcggccgaacggcgaagcggaaatcagagaatactatgaaatggcgccagggatcgttgtagctatcaatcaaaaacagaaggtcaagccggataagagacttgaccttctgttttcgtatttatagttgtctaaaaattatttcgcgttgaccgcttcttcgatggcttccaaaacagtgtcgtagtccgcttccgtgacgaggagggagatctcgacttcggaggtcgtgatgaggcggatgtcggcgtcgcttgcggcgatggcgctgaacactctggcggccatgcccggcgtgtttttcatctgcgggtcatagacggagattttgtggttcacgctgctgacgataaccttgatgctggtctcggtcttgagcgtatttgcaaaagacagcacttcgatgaggtcttggtcagaaatggtaaaagaaaggccggcatttgcaccgtggttcgggggcatggagatcatatcgatgttgatatcgagctccgcgatgcgctcgaatacctcagccataaagcctgtggtggcggggctgccttgcagggtgaccagtgtgatattgctgaccgtgctgatttcggttgtgcccatgatctgttccatcctttcttaaaccaaagcggacatgtcgtaaaggccggggcctttgccgctcatgaataccgctgcgtttactgcgcccaccgcgaacagctctttggactgcgcggaatgggagagcgtgatgacctcgttgttgcccgcaaagatcacctcatgctcgccgacaatggtgccgccgcgcacggaatgaatgccaatctcgctcttttcgcgctttttgcgctgtgcgtggcgatcgtacatatactgcgtttcgccgtcgcgcacggaagcaagcgcatcggcaagcatcaaagccgtgccgctcggcgcgtcaatcttctgattgtggtgcttttcgacgatctcaatgtcgaactggtcgccgagcacctttgccgccttctttgcaagctccagcatcaggttaatgccaagtgacatgttgcgggaatagaagattggctgcgtttcggaagctttggtaagctccgcggtctgctctgctgtgtagcccgtggtgcagagcacagccgggatgccacccttttccgccgcgtagtgcaaaatcggcgtcaaaagggaggggtgggagaagtcgatgataacatctgccgcttccgtcacctgatcgatggaggtgtaagcggggtaggaagcagtctgtgcattgacgttcagatcaacgccggcaacaatctcgcaatcggtgcgttcggaaacaagctgcgtgatgaagtgacccattttgccgcagcagccgcataaaataatccttgtcattttacgtccgttcctttcttaatcaggcgagctgcagatgctttgccatttcgactttcagctttgcaatctgctcatcggacatatcggcaagcggcaagcggcagtggccgcagttgaagcccatcaggttcaatgcctgctttaccgggattgggttgacgtccatgaacagtgcgttcatgaggtcgagatacttaaacgtgagtgcctgcgccgtcttgaggtcgcccgcaacggaagcggtggcaagctcgtgcatttctttcggcatgatgttggagaacgtagagatgacgcccttgccgccgagagacgcgatcggcaaagtctgcgtgtcttcaccggagtaaaccgtgaggtcatcaccgcaaagctcacgcgttttgatgagcgcggagatgtcgtggttcgcttcctttgtggcaacgatgttctgcgtcttcgagagctcgtagtacgtttctggcagaatgttgaggccggtgcggctcgggacattatacacaatgcacggaatttttacactgcccgcaatgcggttgaagcttgcaacgaggccgcgctgggaagtcttgttgtagtacggcgtgacaagcagaaggccgtttgcgccgagtgcttctgctttttgggagagctccacggcgtaggcggtatcattgctgccggtgcctgcgatgaccggcacgcggccggcaaccttgtttacggtgaactcgatgaccttcacgtgctcttcatcggtgagcgttgccgcttcgccggtggtaccgcaggtgacaatggcatcggtgccgcttgtgatctgaaactcgatgagcttttcaagctcctcgtagtttacggacatatccgggttaaacggggtaacaagtgccaccgctgcgccggtaaaaatggtttctttcatctaaaaaatacctcctgaacggtatcagtcaaaatagcccttctttgcgagcagctctgcaagcagaacaccgccgcctgctgcgccgcgcagcgtgttgtgggaaaggcaaacgaacttgtagtcatactgggtatccgggcgcagtctgccgatggaaacggccataccatgctccagctcacggtcgagttttgcctgcggacggtctgcttccgtaaagtagtgcaggaactgcttcggcgcgctcggcagctcgagctcctgtgccgggccgcggaactctgtccagcggcggatgatttcctccggtgagaccttcttttccatggagacgaacaccgcagccgtatggccgtcggaaaccggcacgcggaagcactgtgccgtgatggacggggtggtcgcgttgacaatcttatcgccctcaatgtggccccacagcttcatcggttcctgctcggatttttcttcctcgccgccgatatacgggatgacgttgtcgagaatatcgggatacgtttcaaaggttttgccggcgccggagatggcctgatatgtgcaggcgagcaccttcgtgacgccgaggtccatcagtgggtgaatagccggaacgtagctctgaagggagcagttggactttacggcgataaagccgcgctttgtgccgaggcgctttctctgtgcgttgatgatttcaatgtggtcggcgttgatctccggcacaaccatcggcacatcctcgacgccgcggtttgcgctgttgttggagacgaccgggcactcctttttcgcataagcttcttcaagggcgcggatttcgtcttttttcatatcgacggcgcagaatacaaaatcgaccttggagacgacttcgtccatatctgcaacagcgtctaagacgatcatgtccgccatacttgtgggaatgggtgttttcatagcccagcgcttttctacgacgcttttatatgttttaccggcggagcgggaagaggccgcaagcgcggtcacgttgaaccacggatggttttcaaggagcgttgcaaaacgctgaccgaccatgcctgtgcaaccaatgataccgacattatactttttcatttctttcacccgtcctgtttacaggacatcctttcaaaaatgatgaaatgtacgctcaaaaacaaaattaaggtcaaatttcatttttgagcgaaaaaaaaccggttgaaatccggtcatacatacaatataatagaatgtgcacaggcttttacgaaagtctccctgcggaaaagctctgatagcactccatcctattgcagatgacagttacggggctttcgccacagcaaccagatccaagcgtaccacatgcgctgagatcttcggcggtgtgtcctttttctgcgggccgatgcctgtggagggccaaaacccgcggatacttttacaaaccgcgcctctatccttattataatacatggaatacggattgttgtcaatttatttatgaaaaattcttagaataatcctgcgtaatttgggggatgcggctattttaattcagattggaaggaatatacttggatacgcaaactttacagacaaaagattttgattttgagcttccggaagaacttatcgctcagacgccgattgaaccgcgtgacgcttcgcgcctgatggtgttggacaaaacaaccggtgagatcgagcacagacattttcacgacatcacggagtatttgaatgagggcgattgtcttgtactcaacaattcccgcgttttgcctgcgcgtatttacggcattaaaaacgagaccggcgcgcacgttgaatttttgcttctgaaaaattgcggtgacgacgtatgggaagcacttgcaggtccgggcaagcgtgcaaaggtcggcacctcgttcacgttcgagggcagctccatgacctgcgaggtcatcgaagtaaaggacgacggcaaccgcatgattcgcttccattacgacaagggcacgaacttcttcacggagctggataagattggccagatgccgctgccgccctatattaaagaaaagttcaaggataaagagcgctaccagacggtgtattccaaagaggaaggttctgccgctgcgccgacggccggtctgcactttacgccggagctgctcgatgcaattcgctcaaaaggtgtgaaggtcgtgttcgtcacactgcatgtcggccttggcacgttccgcccggtgagcgtggataacattctcgaccacaaaatgcatagcgagcattatcacatgccgaaagagactgccgacgccatcaacgagacgaagaaaaacggcggacgcgtgatcgctgtcggcactacgagctgccgcacgattgaatctgtcgcaaagaaatgcggcaaaatttgtgaggacgatgactggacggatattttcatctatccgggctttgaattcaagggccttgatgcgctcatcacaaacttccacttgccggaaagtacgctcatcatgctggtctccgcgcttgcgggccgcgaacacattttgaatgcgtataacactgccgtcaaggagcgctaccgcttcttcagcttcggcgacgccatgttcatcaaataactttgaaaggaattttctttacatgtacaagcttatcaaaagagaaaaccacgcgcggcgcggcgagctccaaaccgtgcacggcacggtgcagacaccggcgtttatgaacgtcgcgacggctgcggcgattaagggtgcggtttctgcttacgaccttaaagatattaaatgtcaagtgatgctctccaacacgtaccacctgcatctgcgcccgggcgatgacgtggtgcgcaaaatgggcggcgtacgcaagtttaccggctgggacggccctgtgctgacggacagcggcggatttcaggttttctctctcgcaaagctgcgcaatatcaaagaagaaggcgtgacgtttgcgtcacacatcgacggccatcgcatcttcatgggcccggaggaaagcatgcgtattcagtccaacctcggttctaccatcgccatggcgtttgacgaatgcgtggaaaacccggcggaatacgactacgcgaaaaattcctgcgcacgcacagcacgctggctgcgccgctgcaaggcggagatgaacagactgaatgcgctgccggatacgatcaacccgaaccaaatgctgttcggcatcaaccagggttgcacatacatcgacctgcgcgtgaaccacatgaaggagattgcggaattgggactcgatggttatgccattggtggccttgcggtcggcgagccggcagaggtcatgtatgaagtgattgaagcggttgaagagcatatgccgcaggataagatccgctacctgatgggtgtgggcacgccgacaaatattctggaagcggtgcaccgcggcgttgatctgttcgactgcgtgatgccgagccgcaatgcacgccatggtcatgcatttacaaatgaaggcgtgcgcaatatgctcaatgcgaaatacacgctggacgatcagccgatcgacccgacctgcgactgcccggtctgccgcaagttttcccgtgcttatattcaccaccttttcaaagcgggggagatgcttgccatgcgcttgacggttatgcacaacctttatttttacaacaatttgatggaacgcattcgtaacgcgctcgatgaagaccggtttgaagcattttatcaggagtattcagagaaatttaacaaaagaatttagaaaatccttgcaaccacgaatggcttttgttataatgtataaagttaatttggtgacgggtgtattgaccgctttgcagtcgaacggagcgcaccatgaaagaaaggaaagaaaaccatgaatttgagtgttttgacaacgacaggtgcagcagccggcggcaacatgtccagcatgctgatcatgctccttgtttacggtgcgatcatcgcggctatgtacttcatcttcttccgcccgcagaacaagaagaagaagaaggaagcggaaatgcgcaagaacgcacaggtcggcgacgagatcacgaccatcggcggcatttgcggcagaatcatcgctgtaaaggatgagaccgacagcgttatcatcgagaccggcagcgaccgtgcaagactgcgtatcaagcgttgggcgatcggcagcgtcgataccatccacgaggaagacgcgtaagtttcactctgtttaaaagcgaatagttttgagccccttggaataagtatgaaacaaaacttatttcaaggggctttttctatgctgaattttaagaagctgtttttgggtttcctgttttctatgctgttttcggctgtgctgaccacggtttgtgcctttataattttaaagctcggctttttgccgtccgagcctatactcggtacggctgcggcggtgatcggcggcgtttctgtttttgcttccgctttccttgcggcgcgcctcgcgggggaaaaaggcttgctgcacggccttgtgcttggcacgctctatgcagttttctatgttgcgataagcgttatgctgtatgcaaatatgcgggttgtacttcttgttatacggagcgtaatatttgtaatatgcagcgtatgcggtggagtaatgggcgtgaatagagatgaaaaagtcagattttaagccataattttgtagctgctaatcaagagcataagaacgattttgcatatttattcacaataacttgtagcaaagcagaaatgcatattcataagtttacataagattatagacataaatttgcgcagatgcaaaaatattcacggaagctcttgcaaatttggctaaaaagtattatagtatataagacagaagtgaggtggcgtatcatgaaaaacggcaaattgggctttatcggcataggaaacatggcgtccgcgattattggcggtattttatcttccggcactttcccggtcggggatatttatatgtacaatccgcacgcggaaaaaatgcagcgctttacagaatccggttgcgtagcctgtacttctgccgaagaagttgccgagctttgtgatacggtgttcctttgcgtaaagccacagattttcccggaggtgctgcgcgttattgcgccgaccgttgcgaagaagaatgcagacgatgttgtcatcgtttcaatcgctgcgggcgtaacgtttaagaatttgcaggacgcgctcggcgcagaccgccgctacgtgcgtgccatgccgaacacgccgctgctgctcggtgagggcgctacggcgctgtgccggacgagcaatgtgtcggaagaggattttgcgcgcgtgcgttccgctttctcctgctgcggtgtcacgcaggagatcgacgaagcgcagatgaatgcggtgattgcggtcagcggcagctcgcctgcgtatttgtatctgcttgcaaagctcacttgtgattatgcagcgcagcagggcattgacccgaagaccgcgcttacactgttctgccaaaccatgaaaggtagcgccgatatgcttttaaacagcggtaaagacccacaggcgcttatcgatatggtcacgtcaaagggcggcacaacatttgctttgctgaatgtcttgaaagaacagggctttaatgaggcgatgatcagctcgtttgaagcctgcacgcaccgcgccgaagaactttccatgtgagtgtgcaaggcataacacggcgacgcttcacatatagattgaccatcttttacaggtggtgaacgaaaatggaagcaaagccgaaatatgcaaaaccatgtagcttatctgttttaatggctttgcgcattttgtttctgcttggctttttgttcggttgcttatttgcacggacatcgcaaatagctatggcgccggtttccggctctgtgtggtttagggggccgtttgaaacgggaacggactttccgtttgtattttccgcatttttgtttgattcgcttttttacgcattgccgatttttttatttggcatgacgtttttaggtgtgcttgtgattcccgttgcgataatcctgaagggcttcacgcttggcacgtcgcttacggcactgatccggcttgagggtatcggatcgtattttcggcggtgctttgattatctgccgatgacaatgctgtgcatcacggtgcttttgttgcttgcggcggaagcgctttgcacggcgaggcgcagctgtcgggtgtttttcggaaacggagaaccgctttccgtaaaaaactgcaccgtgcggtttttgcttgcgtttgcggcgctggttttaatttcgactttatacggtgcattacactttttgattttgcaaatttagattttaaagcaaaggaggccgaaatgaatgaacatggatgaatacttcgtgctgtttcgcgagtacatgctcgtgcagaaaccgagttccgtaaatacgcgggattcttatctgcgcgatgtttcggctttcctgcgctacttggagggtgaaaatataacatctccactcgaagtggaaacggagacggtggaagcgtatgtgcagcatttgcacagcttaaaccgcacaaattccacgatctcccgcaatattgcctctgtgcgttgcttttataagtttctcatcctgcgcggggatatgcaggtgaacccggcgaaatccgtaaagcttgaaaaagagccgaaaaagctgccgcagacgctgacaagcgaggagatagacctgctgctttcccagccgaatgtcacggaagctaagggctgccgcgataaagcgatgctggagcttctttatgccaccggtattcgcgtcagtgagctcatcaacctcaacgtgcaggatatcaacctgcgcacgggaaagctgttctgccgcggcaccaagggcgtgcgcaccattccgatttatgcgaaagcggtcgttgctgtatccgattatctttaccgtatgcgcgatttgatcgtggacccggacaacagcggagacgcgctgtttgtcaatctgaacggctcgcgtttgacgcgccagggtttctggaaaattatcaaggcgtatacggcggaggccggcattacgaaggagattacgccgcacacgctgcgtcattcgtttgccatgcaccttttgcagggcggtgcttccgtaaaagacattcaaaccatgatgggacatgcagatatttcgtccacacaggtatatgttcatttattagaccttgataatcacgtgaaaagcgtgtataatgagtgtcatcctcgtgcaaaaacgagttaatctaattctggagttgattttgtggcatttttaggacttttcggtaattatgataagccaggtccgggcgttgacaaagatgaaccgaaaaaggcagcgccggtacgtttttttgagatcttgtggcgaaaactgtctaaactggtgcagctgaatctgacatttatgatcccatttattgtggtcatcgcgttaatggtgggcgtattctttttaccgattccgcactttctttatgcaacgtcgttcttcggtgtgcttgacctgtacattctgtatgcggttacactgccgctcatcctgctttcgccgttcacatgcggcttagcgtatgtaacgcgaaacttcgcaagggaagagcatgcgttcgtttggtcggatttctgggacgctgtgaaaaacaactggaagccggcacttttgaacggcgtgatcgtgtatctcgcatatgtaatcttgagcttttcaatcttcttttattccacacgtgtatcggacaactggatgtttatgattccgcttgcggtttgctgcatcctgtcgattctaatgttgtttgcgcagtattacattccggttatgatcgtcacgtttgacttgaagctgcgccacatttacagaaacgcatttattttctctattatgggcctgttgcgcaacctgatgattacggcaatccttgcgggtttgttcattgcgtttttgttctgcccggcggcatttgcggtgatcccgctgctgctcgtaattattttcctgtgtgcgttcatcagctatctgacgagctttgcaacgtattcgttgctcgatacgtatctgatccagccgttctacaaaaaggaagcggaagcgaaggacgccgaaattcgcgtagccaaagacggcgatacgttcaatttcgataatgatgagttggacgacgatgacgatgacaagccgcagtatgtgtacgtgaacggccgcttgatcgaccgtaagatcatggagcaggaatctctgttctcggataaaacggatacttccgatcatttacagtaatttaaaacaaacataaaagcctctatcgaactggaatcgatagaggctttcattttgctcaattttaattatttcttattcttatcggtcttttcacgcattttggaaagtgggttggcgtttacggcttcctccatttgcttgctggaggtgtgcgtgtagatctctgtagtgccgagattttcgtggcccagaatatcctgcaaaacgcgaatatccacattgccgtattggtacatcagcgttgccgccgtgtgccgtagcttgtgtacggagtatcccgcgccgccaagaccgattttcgtgaggtatttattgaccatggcctgtacggtcttaggactgatgcgtgtgccgcggttgctgatgaacagcgcgtttttatccttcacgtcgtcctttgggcgcacacgcacgtaagcatcgatagaagctaagcatgcgtcatttaagtatacgatgcgttctttgctgcctttaccgacgatgcgcagggtggagttgttgtggatcacgtcgctcatgttgatggaaacaagctcggaaaggcgcatgccgcagtttaaaaacagcgtcaaaatgcaatagtcacgctctttatccggcccgtccacggcgtttaaaagctcgcggctttgctctaacgtgaggtagcggggaagggttttggcttttttcggcggggtcagattctctgtggggttagaattcaaaagaccctcgtgcacggtcaggtagttaaaaaagcttttgaggctcgaagattttcgctgacgcgtggagctcatgttgctgcgtccgtcggcagcgtagttcatgaattcaaaaatgtccatcgtcgtgatggaacggataaattcaaggtcaatatcatcgatcgggatctcctccatgggtgtatcttgtgaaacatatccgcgaaaatgtttcatgaagcgaaagaatgtccgcaggtcagagcagtattcgtttacagtcttcggcgcgcggcctttgatgttgcggtaatataaagcatattgccgcacaatctccggcatttcaggcaaaatatccataacgggtacacctcacaaattttgaattttaaagctgcagcttggtgttcagctccgttggctgcaaagctttcggatttggcctaatcggtacttgaatttactcttggattatcattataattcggaacgagacgtatagatatgctgcggtacttaaaccgacagcagagaaaacggagccgaggtaattaaaaacaatctttattgagaaacgcacggatttccgcagtcgagatttacaaagaatcaacgcacacaatcacaattcataatgaatgcgtatatttaagtaagctgaaacgcaaaacattgggttgggctaaaacggatgatctcgcaggttttacgaaaatctgcttgaaaagccaattattcgtaaaatgctgctccccaaattatacaaaatatctattttgtataatttggaatttttttagattcaagcccctttgtatgcttccgtgtgaatctgttttgaaatgtgcgtgtttgggtgctggtacatgaatacacaggcgtatagaattaagaattatgcatcaagctccatcagtggtaaaatgccgccgatgtcaatcatctggttttgcgtcagctcaatgtactgtacgcagtgcttttcgagaaacgcacgaatctccgccgcgcactctaaagaatcgagcttgcctgtgaacgctaccacatttttgtcgatcaggccacagcagccgcctaagaagccgtaatcgtagccatccagaaaaacgttttcttcgtgcacaagcagcacgtcgatgcctaaaaactgtgccagtgcgcgaatgccgagatccatcgtgatgattgcgtctttcgccacaacagccgtcgcacagcgcgtgtagccttggttgacatgcctcattttaaggccggcgtcttccagacaggtgtaaatgttcggatccataacaccgaggtttgcaagcactgtgccgttcaggtttaacatgttgcaaagaacatctttcggatatttcggctccggagtcatagcagtctccgctacctgatagccgatatccgtaagctgctttttgagtgcctcttctccgcgcagaacaaacgtgcgtcccttatccaaatgaaacatctgcatatctgcatggtacgcgatcggatccggcagacgcgtgtcaaactccgttgtgacgcaccgaataccatgcgcctttaaagcttccaaaatctccggatatgcgccggagaccgccgctgtcgtgaccttgctttccggcagattcggcttttcaacaaatcgttcttttactgcacacatgcgtcaaatgcctccctcacgttgtggacgccaatgagctccaccccgctgaatctttttgaatctatgctcttcatgctgtggtacggcagtacacagcgcgtgaatcccagtcgatatgcttccgaaacgcgggactcgatatgactgaccgaccgcagctcgcctgcaagaccaatctcgccgaacacgacggtatcatcgcggattggcgtatctttcaggcttgatacgagtgccattgcaacggccagatcgaccgccggctcatcgatgcgcaggccgccgacgacgttcaaatacgcgtctaaattggaaaaatagaaacctgcacgcttttccagaacggccaaaatcagcgccatacgcgcataatcaaagcccgtggacatgcggcgcggcgtgccgaagccgcttgtcgttgcaaggccctgaatctccgcgagtagcggacgtgtgccctccattacggcggttacgcatgtgccggaagcgttcgtcgggcggccggaaagcatcgcctgcgaggggttttcgatctgccgcagccccgcttcccccatatcgaatacgccaatctcgtttgtggagccatagcggttttttacggcgcgcagaatgcggtacgtcatctggcggtcgccctcgaagtacagcacggcgtccacaatgtgctccaacacctttggacccgcgatggcgccgtctttgttgacgtgaccgacgagaatcgccgggatatcgagcgacttggagcagcgcatgatcgcgttcgtgcattcgcgcacctgtgtgacgctgccgggcgacgaattgagatcggtaaagttcatcgtttggatggagtcgatcatcacgatatccggtttttcggtgcgaatgtgctccaccacaagctgcacgtccgtttccgccaaaatgcgcaggttggggctggaaacaccgagacgccctgcgcgcagcttgatctgccgtgcagattcttcgccggaaacatataaaatacgcagcttttgcccgaggtattcgcagatctgcaaaagaatggttgatttgccgatacccgggtcgccgctgatgagcacgagcgagccttttacaaggccgccgccaagcacgcggtcaagctccgaaagtccggtgtgataacgatgctcgtcctccgtatcgatctctgaaattgcaagcgggcgcgtcagcagcgtagaagctgaagaagtatacccggaagcggcggattttgcggaaacagctgttttgactgattcctccatggtgttccactcgccgcaatccgggcactttcctgcccactttgcggattcaaacccgcagtttgagcagatgtagacgattttatttttagccgccataacgcgcaccgcccttattttgtataattctaagcctattttaccacggaacagatgttttgtaaagagttattccgctttgcaaaatgcgataatgccatccacgatagccgccgccaatttcttttggtagttctcgtcgcacagcttttcagcttcttccgggtttgagaggaacccgcattccgcaaacacggcgggtacgtctacatggctcaaaatatacacgcggctttctgcctgcttgcaggcgcgcgtgttatccggctgcacctgctcgatgactgcacggcggatggcttcggcaaggtcggcgcttttagcattatttgctgagtaaaacatctgtgcgccgctgtattgactttgctcaaaaaagttttgatgaatgctcacaaaaatacagttctcagtctcgtttacgatctgtgtgcggtataaaatatcagaccgctttcgttcgtttaatgtgctcagtgtggtatcgccgacggcagtgtccgtttcgcgaatcattttcacggggtagcccgcagcttcgagcttttcccgcacaaacagcgcaatggcaaggtttaccgttttctcttccacaccgtttacgcctacggccccgccgtcttccccaccgtgccctgcgtccagaacgatcacggggcggttttcggtctgtgctgcggctacagataccgcatgtaccgcacccaaaacagagcacacaaaaaatgtcagagcaccgaggaaaaacaccacaggaatatacgcgattttaaaagacaaataccgtttcaagtcgcatcacccatagatttttatgcattgaagctgccggaaataccctataaaaagcaaaaagctgcccgccgaagcgaacagcttttttagcttttatgaaattacttgaagaacagcgggagcggctccagatagatgatatccgtacgatcctttgcatcgccctcggcgagcacagccgccttaccgacgacgttaccgccgatctcatgcacgagatcttccaacgcgctcagcgattcaccggtgctgatgacgtcgtctacgatgagaatacgcttacccttcagcattgcacagtcttcttcggagaggtacagcgtctggatgtggtcggtcgtgatggatttcacctcgaccttgatcgggttcgtcatgtacgccttgatgcccttacgtgcaacaacgtactgacggcagccgatgcgcgccatctcgtaagccagcggaatgcccttagattccgccgtgatgatgatgtcgtgctccgggcacttttccatcagcgcttttgcggtcttctcggtgatctctacatcgccgaacataacaaaaccggcaatatccagcgtatcgctgatcgggcagatcggcagctcgcgttcgcagccggcgatcgtcatcttataaacttcacccattgtaaaaacctaccttcaaaaattatcgattttcgttatatgcggggaatcagcccggaggccacgccatagagcgtccgccgagcaggtggaaatgcaggtgctttacggtctgtccgccgtcttcgccgcagttgttgacgatgcggtagccgttcgtgagaccttctgccgccgcaatcttctttgcgaccgtgaagatatgtgcgacgatctgcgcgttttcttccgtaaggtcatctgcggaagcgatgtgctcctttggaatcatcagaatgtgcaccggcgcctgcgggtcgaggtcgcggaatgcgagcattttgtcgtcttcgtagaccttcgtgctcggaatctcgccgttggcaatcttgcagaaaatgcagtccatttgcctttctcctttcttgagattttatatagaacgtagagagagcttagatctgttcgctgaggatcttttcaacggctgcaagggcttcgtcaatcttcgtctggtccttgatgcctgccatagcgaagtccggcttaccgccgccgttgccgccggtgagctgtgcaactgcctttacaagcacgccggctttgacgccctttgcctgtgccgctttcgttgcggttgctgcaagcgttgcctttccgtccagaacgcctgcgagcacggctacaatggccgtatcgctcttttcgtcgcggatcttatcgcacatggtgcgcagtgcgtcgctgcctgtgccggagagcatcgccgtaacgatcttgacacccttaacttccacggcgttatccagaatggagccgaggttcatggatgcaatcttggagcgcatggattcgatctctctgtccttctccttgagatcggcgttgacctgtgcagcttttgccgggaggtcggacgggttattgactttcatcgcaacagcggtatccttgagcagcgtgttcgttgcgtagatcatcttaatgacgttgagacctgtgaccgcttcgatacggcgcacaccggctgcaacggaggattcgctgacgagcttgaagaggccgagcttagcggtggaatcgatatgcgtgccgccgcagaattccttagagaattcgcctaccgttacaacgcgcacgacgtcgccgtatttttcgccgaacaacgccatagcaccgagcttctttgcttcttcgatcggcatttcgcggcactcaaccttgatgtcttcgaggatcttctcgttgacgaggttctcaaccgcgagcagctcttcgtccgtcagggcggagaagtgcgtgaagtcgaaacgaacggcattctcgttgacgagctgaccggcctgctcaacatggtcgccgagcacggagcgcagtgcagcctgcaggaggtgagctgccgtgtggttgcgcatgatcgctctgcgtctctcaacatctacaacagcctcaacggtgtcgccttcgcggaggaagccttcctccacaacagccttgtggataaacacacccgctgcattcttcgtggtatccagaacgcggatggtgcaggaatcgttcgtgatgacgccggtatcgccgacctgaccgccgctttccgcatagaaagaggtgcggtcgagtgtgaacacgatgtcgtcgccggtctcgacagcttcaacgcgtgcaccatctttcacgatagccgtgacctttgcggttgccttcataccggtgtagccgacaaactcggtctttgcaatgtcgtcaagcacatcggagtcgcccgcccatgcatctgcaccggcattcttgcggcttgcacgagccgtctcacgctgctggagtaccagtgcgcggaagcggtcttcgtcaacgctcatgcctttttcggaaaggatttccttggtcaggtcaatcgggaagccgaacgtatcgctgagcaggaacgcgtcttcgccggaaagcacctttgcatcggtgcggtcgatgatgtcgttgagcagcgcgaagcccttatcaatggtcttatagaagttttcttcctcaaacgcgatgacctttttgatcatagcgctcttttcacgcagctccgggtaagcgcactcgttttcgtgaatgacggtatctacaacgtccgcgaggaacgggtggttgatgccgagaagtctgccatggcgtgccgcgcggcggagcagacggcggagcacatagccgcggccttcgttggacggcataacaccatcgctgatcataaacgtcgtgctgcggatgtggtccgtaatgacgcgcagagaaacatcggacttttcgtctgcaccgtactgcacatttgcaatgcgggagatatgcttcatgatgttctgcacggtatcgacaaggaataggttgtccacgccttgcatcacacatgccaaacgttcaagacccatgccggtatcgatgttcgggtgatcaagcggcgtgtagttgttgttgccgtcgttctcaaactgtgtgaaaacgaggttccaaacttcaacataacggtcgcagtcgcaacccacgccgcaggtgggcttgccgcagccgtacttttcgccgcggtcaaaataaatttcggaacacggaccgcacggaccggagccatgctcccagaagttatcttctctgccgaggcgtaccatgtgcgacgggtctacgccgttttgctttgtccagatgtcaaacgcttcatcgtcgtcctgataaatggagatataaagcctatctgccggcatctcgagaacctttgtaaagaactcccaagcccaagcggtcgcttcctttttgaagtaatcgccaaaggagaagttgccaagcatctcgaagaatgtaccgtggcgtgccgtgatgcccacgcgctcaatatccggggtacggatgcacttctggcaggtggtaacgcgctttctcggcggggtcacttcacccgtaaaatactttttcatcggggccatgccggagttgatcagaagaaggctattgtcatccttcggaatcagcgggaagctcggcaggcgcagatgtcccttagactcaaagaaagaaagatacttttctctgagatcatttaatcctgtccactgcattgtattcaccattccttctataatttgcagatagaataatataaaaagcctaagctcagtctaaaacataagcctcaagcagctttaacgtattttcgacgcctttaatgtgggaacgctcgtagccgtgtgaagcgtaaacgcctgcgccaatgaggccgtgacgcacgtcccagccggaacgcagcgatgcctctacgtcggagccgtagtgcggataaacgtccacggcatactttgcaccgacggacttcgccgcttccacaagcgcggttgtcacggcataattgtacgggccgccggaatccttcacgcagatggaaacttcgcgctccgtgcaggtgagcccgtcgcccacgcagcccatgtctacgctgatgagctcttcggcatcgttcggcacggaagcggaagcaccgtgtccgacctcctcatacaccgtaaagtgcagatagaccttgcgcttcaaagtgcggttgttgtctttgatctcctttgcgagcgcaagcagcatggcggcgctgagcttatcatcgaggaaacggctcttgatatagccgctttccgtgatgacggtgcgcgggtcaaagcagacgaaatcgcccacttcaatgccaagtgcacgcacatcatcggcggattttaccggctcgtcgagcacgacctcggtcgtttcaaatgtgcgcagcttttcaccgtaggagccgttcacgtggatcgacgcattgcaaagctgcaaggtgccgctgtaaacgccggagaagcgcgagtaaatgcggcagttctccgcttcgcagttttcggcgcgcaggccgccgatcggcgtgatcgtgatgcggccgttcggcttgattgtggaaatcatgccgccgagcgtgtctacgtgtgccatcagcacaagcgggctgccctcgccgccgaggcagcagaaaacgccgccctttcttgttctttccggagcgtagccgagtgctgtcagttcaccgataagatagtccgccgctttatccgtaaagccggacggagaatcgatggaaagcagggctttaagctcggaaaggcaatagtccatattcatgttttgccactccttacaaaaaaataagaactgtcctccgcaatgggacggacagttccgtggtaccacccaaattgtgcatgaagcttttcttcatacaccactttgaactccttaacgcggaaaacggcacagctcatcactgtgcggcagtcatacgggttggcctgtacatggtgttttccgaggatcttccagcctgtggatccgctctctgttcggtacagctatgtgcatttgcccgtgccttttgctataaaacaaattaaaatctaaaatcaccagcggctcatgtttcgtttgtgcttttcgagatatacgttctcgacttcattcggcgtgatgccgtagcacagcagaacatcgtttaaatacatgagcacatcacacacttcttccgtgaagtggtgtctggtctcggggtcgttcaaaatcgcatcgtcaccctttttcttgatgatgtcggcaacttcaccggcttcaatcatcatccaaaggagcttatcgcgaccgattttcggagaaaggcctccccacttttcgagatatttagcttgcagttctttttgaatctgctgcatatcttcaagattcaggcttgccatatctccacccctcatacgtatcttattataatgcttttttaccggcttgtcaattaaaatcgacaagtgcttcgccgattttacggaaagcctgcggtacatgcatttcgccggcagtttcttccaacacgacgagggtataaagcggctcttcctgtgcattgcagatgtagcctgcataccaataattctcgatttcttccccattttcgtcatatatacctgtctgcgccgtgccggtcttgatgccggaaacacagttttgcggcgcgccgaaccgtgctgtaccgaaccgtgctgtgctttccatataggcacgtaagcgtgcggcggtcgtcggctccatgactttttcaccggtgttttcttcggtttcctgtacggatagatttgtatcgaccatgccgtatacgagccgcggcgtcatataaatgccgtcagcggcgatggcgtttacggcagcggccaaattcagcggtgagacagtcgtttcaccctggccgaacgaaaacagcgccagcgcacgggcgtttttaagggcttgcgcgttcgaaagcgagcctgcggccgtttctaaattgtctgcaagcgaaacagatgtaccaaagccgagcttttccgccatacttaaaatcttttccgcgccgagcttctgcgcgagctgtatgaagtatccgttgcacgagctgcgcaacgccgtgtggagattcacttccccatgtgctttgccgccgtagcaagtgatcgtgaggccgtcaacaacaatgcttccggtgcaggtatacacctctttgtaatcgatgccgtattcgagcgccgaggcggcgcagatgagcttaaagaccgaaccgggcgtatacgcgcacagggaacggtttacaaacggtgcatcttcattttccatgcacgcagcaaggtcgttcgggtctacggctgggaagcttgcggaagccagaatttcgccggttttgcaatctaaaatgacggcggcgccttttttgatttccgtgcaggcattttccacacactgctgtatgcgcttatccagcgtcagcatcacgccgccgtccgcaatgcggtatgtgttttccacgtgcattgcttcgccggagatggcattgccgagcgcatcaatggcgaaggtaacgtcgatttccccgtggttttccgcaagcagtgcgtcgaagcttttttccacaccgtccgcgccgttatagtcgctgtcgagatacccgagcagattcgccgccggttgcgggtttgcataccgttttgtgacggaaaatgtctggatgccgtcatcactgacgggtgttgtgacttcgatcagaaacggctttccgctttcaagcgccgtgcgcaggacttcgcgtttttcttccggtacagcgcggtttaatttggcaagcgtttcccgcgagggaattaccgcagcgacataaacacgctcggcgtttgtgagcggctgcaaattgcggtcgtagatcgtgccgcgcgccttggcggccgttaaggtatataaactctgccgcccggcggcctccgtatagcttgtgccgccgaaagcggcggtcacggtgccgagcagtgcgatgacgagaaagaacatcacaaacgcatacgttgcgatgatcctgcgtgtagacataaaaacacctccgtataggaaaagtatgggccctaaacggaggtgttattcagccgcgcttcactcttagaaacgcgccctctttgatttttcggtcggtcttgaggtagaccgtcatcgtcgcgtgcggtgcggattcgattggctccatatcctcgttgtagatttcactaagtgtgaggtcatacggcacttcgcccggctccagtacgctgacagtctcgccgcggaagaagcggttgcgctgtgaaaggcgcatcatgccgtttccttcgccgatgcacacggccgcaacatcccagccgcggatatatccgccgctgtttacggtctgccccggctcgtgaccgctgtaaaacccggtgctgtacgcgcgatggctgatcttctctgtctcgtccacgacccactgcggaagcggctcaccgttcatgacagcatcgatgccgtggcggtacgcattcgtcacgcaggcaacgtaatacgcggactttgcgcggccctcaattttgaggctcgaaatgccgcattcgatgagctgcggaatgtgctcgatcatgcacatatcgcgggaattgaagacatacgtcgatttctgatcctgttcgatcgtgaacacctgatccgggcgcgtgcgctcgatgaggtaataatcccagcggcacggctgcgcgcaatcgccgtggtttgcgtctctgccggtcatgtagtttgaaagcaggcagcggcctgagaacgaaacgcacatcgcaccgtgcacaaatgcttcgatttcgagcgccttcggcgttttcacgcggatctccgcgatttcttcaaacgagagctcgcgtgccagcacgacgcgctctgcgcccatgttataaaacgcgtttgcggtctcataattcacaacgccggcctgcgtggaaatgtgtatcgcgacattcggcgcgtatttttttgccatggccatcacgccgaggtcggtcatgatgaacgcgtctacaccgattgcctggcaaaactcgagaaacgccggcagcgcggcaagttctgcgttatgcggcagaatattacaggtgacatagaccttcacgccctgcgcgtggcagtattttacagcttcttcaagctcctcgtttgtaaaattggaaggcgcagagcgcatgccgaaggatttaccggcaagatacaccgcgtccgcaccgtagcgcacggcagaaataaggcgttccatatcgccgaccggcgccagaagctccggcgcgttatatcgtttttgttccatgaaattcattcctttactgcatttgtgccttcccggacaaaattcgccggaaaggcacaggtggctttgttatcgtaaatgttgtgtcggttacagcagaccggcttccgccatgttcatcaaatgctcgtccattgtggaagcatagtacggggtgccgtcactgtcatggcagaagaagtaatactcgctgccctcttcggacggatagattgccgccttaatagcttcaagacccgggttgcagatcgggcccgccggcaggccgctgttgtcatacgtggagtacgagcttacgaagccctccggcgcgtcattcgcggttttgtacggataataaactgtggagtcgcagtccagcgtgtggatgtcatgctccgcgccgttttccagtcggttgcgcaaaatagcggagatcatatacatgtcgtccgtatttgcagcttctgcctgaatgatggaagcgagcgtgataatctgatccgtggtatagccggatttcgcaatgtcatcgcgcatttcgtcggtgagcttattttcaaagttattgaggaagcggtcaaggatcgattctaccgtatcgttttcaaagaactggtacgtatccgggaacagatagccctcgagcttatagtagcggtcacttgtgttcgtgatggctgcaacatccgagtagctgtcgtaatccgaagagttgcaggcttcaagaatctcatctgcagtgtgcaggccgttttcttccagcaaagcggcaagctgctgcaccgtgatgccctcacggaacatgacggtaatttcttcgccgagatccgggccggactgtaaggtgttgacaagctgcttataatcgtagtttgttttgatcgtatacgtgccgggttcaaaatacttcatttctgtggtgaatttgcagaaaagggagaaaaactccggtttatcgatcgcgtggctcttgtaaagaatgtccgtcagctgctcctgcgtcacgttttcgggaatcgtgacctccacttcggaatctgtgcggtctacaccgagaaaatcgttagagccgccaatcaggtacgaagcgagggtcagagagaccagaataaccatggcaagccacgtgaacgcgaaaatgcgcttgttttttctggcctttacacggtttcttttcttgtgctctttcgcttcttttttctgattgcgttccgcacgggcggagcgtgcaccggcagagctttcttccacgcgctgtggtgcgcggctgccggcagagccctgcaagtcctccagttcgtctgtgtgattgagctgatcttcggaaagattcagcttgaattcgcgcgaattctggctgcgcggtgtcgcgtccttcggggcgtagcgcctgccgttatcactcatattttcattccatcctttcttcatctgccgtcaaaacgagccgcttgtcggtcaaaataccgtccatgcgtacatcatgcggctgcgtcggcacttgcggcacgagctgaaaatcgtagcataggccgagctttaaaaccggatgccgtgcaaaaaacgtatcgtagtaccctttgccgtacccgagtcgtgcgccgtctgctgaaaacgccagtcccggcacaaggcacagtgcattcgcctcatcttgatatgcctctgcttctttcggttccaaaatgccgtaagcgcccggcgaaagatcgcgtaaagccgagatgcggtaaaacaccatgcggttcgtgtttggtacgcatttcggtacataaagcgctttgccgtctgcaagtacacgatcgagaattctgagcgtatccgcttccgtgccgaagcttacgtagctcaaaacacacgatgccttttggtacaccgaaagtgccatgagccgctgcaaaaggcagtcatcccgtgtagcacgatccgtgcaggctttgcgtgccgcacgcatttttcggcgcagtacgtttttttcggttatatcggtcatcaatccgtgcactgaatgccgtcgtgaatcttcttttcaacgtccttgccggccagcagtccagcaagcgtcaagccaaactgcacggcaacgcccataccctttgccgtgacaatcttgccgtctacgcagaccggcttttcggagattgtggcgcactttaattcgccttcaaagcccgggaagcagatggcttccttaccgttcaggaggccgagatggccgagaacgctcggtgcagcgcagattgccgcaaggtaaatgtcgttctttgcgcagtattccgcgcaggttgtgacgatcggcgatttttcgagatttagtgtgccgggcatgccgccgggcaggatcatcagctccatatcgtccgttgtaacgtctttttcttcgatgtcagctgttacggtgataccgtgggagccggtgattgttttgccgccgacgccgacggtctttacttcaagctctgcgcggcgcagaatatccacgggcgcgagcgcttcgatctcttcaaatccgtttgcaagaaatacatagatcataataaatcctccagcttttccttgatctcgtgatgaatatcttcaatgctgcgcaaggtgtcgccctcggcgcagtttaatacggtccagtttaaatgctctgcggcgtacagtgcacagtccctgcaatgtagcagataatgtatgtcgctttcgtgaatgtcttttttggtggtgtcgcctgcgtagcgctctgtgagcagcctttgggaaattttcggcggcacatccagataaatcacacgatccggcctcggcagcccgaatttttcatattccaggtcttcaagccacgaaacgaacgctttccactccgtttttggcagcttacttaattgatatacaatgttggacgtcacatagcggtcggagatgatcggcacaccacttgcataatcgtctttccacttcatgcggtagcttgcaaagcgatccacggcgtaaaatgcgcttgcggcgtaggcgttcacgtctcccgcctcttttccgaaatcgcctttcagatacatttttacaagcgatgaagacggagagtcataatccgggaacgttacctgccgtgcgcgaccgcgcgataaggcgtaatcatacaaaagctttgcctgcgtgcctttgccgctgccgtccagaccttcaattacaatcaatgccataagttccatttactgctttctgcgtaaatttgccggcctttgccgactttttgcaccacagcgcggtacattcctattcattatagcaaactgcggcgaaatatacaaccgaaaaatttcttacaatgcgaaaaaaccgagcaaagcggcgggacaggcacaatacccgcccttttccgtacaatggcattgagaaaccacaaaggaggtttacaaatatggctgaaaatgagcggatacccgattgcgaaaacggcgcagcgttaaaagaagccgtctgcatagatgccatgcgcatttacgattcctgttcagaataacgagatgcaagctatagagtaggttaaaacgccacaataaccctgtacctctcatcaagcactttgccggtgtcatcctgcgcgtcaagctgccacacggtctgcacggagaacaagaacacatgcacgtggtcggtatgtacggcgacggcatagactgccacggtcgaaagtgttgtacttgtttgcttgtcgtcgtatggaagcaaaagcgtcgcgttgtcgaggtcattttcaagcggcgtgtgccctacacgttcagcccaacggtcaaattttgttctaatctgctcttttgtcatagctatccctcttttgacatatcatagcagatttttgcaggcctgttcaagattttcctgacatttttgccgcacctttttataatatggtcgataaatctgtcaagcgccccgcgtcaagtccttccgacctagggcacggtttttctgaaaataaaaaaagacgcagagcctgctcggagattccggccgccctgcgccttttgctttatgtatttacttttagaccttcttcacccagtccttcgcgacccagccgccggctttgagacggccccagcccttggcggagccggggccgctgcgctcttcaacaatcgtatagcgcagcgtgtccttgatctggccccgcacgccgtaattcgtgcccggacccttgcggatgttcagcgggtcacggcagtttttgcgaatgaggtacggcttgaaggtgccggatgcaggtgtggatgctgccggtgtgctcgccgtcatgtagcttttcaccatgttcaaaaagcgcgcccagcccttgtcgagcgtgcggtgcgggcaatatttgccgtcgaagtcctgatgcttcttcacgtgcgaaatatcccacttgcgctcggtgagcagctttgcgatatactttgcggcgttcttttcggctttatcgaaacgcataccgcccgaaagcgaatagcaaatttcaatgtggatgccatgcgcgttgccgtcgcgctgccctgccgcaaacgcacctctactcagcggaatgccgacaacgatctccttgtcatcgactgccgcgttgaacgacgtagagctgtcgttgcgaatcatatacgcgacttcattcgcggcggaagcatcgttcgccgtgttgtgcacgacgatatatttcatgtcctttgcacaggactccaccggaactttcaaatcgtattttgcagaagataatagattttcgcgaatgggtaccattatttttcctcctcttcttcgcttacggtgttcttcaatctttccaacagtttagacagccgcgggaaccccggcacgccgatagccgcaaggttttccatgacggaaataagctcgttgatgatgagccagatcgcgaccagcaggccgcagaaaagctcgatgtgcaggtcgatgcccgcctgcaccagggcgccgcgcagcagataatccacgcctgcgccgaccgccaccatcgccatgtagcagagcttcttcaggatgcccttgatgccgatgcgcgagctgagctgcgccgtcatgtaggctttgaccatgccggtgacgtaatcgatcaccatcatgcacagcagcacgagcaccggcgcagccagctgcccgcagtatgccgcgacccccgccccaacgactgccgttacggatttaagtacagttgctttgttcatttattttcctccttaaaattttaaagtttatccagccacaccggcggtgcggggattgtccgcgtctccggcgcatcaagccaagagagataccagtttgcaagctcggctttttgctcgtctgtgagtaggctataccacagctcgccgcgattgatatacgcaaagcactcggtttcgcgtcgccgccgaatgacggttagctccgccgcatccgcgtcggccttgagcttatctgcatcgagcacgagcacaccatccgccaccttgtacgcctctgggtgctgcttaaagtcctccagcagctcgtcgggcgcctctatctcgacgccgtctacaagcccaccgatgagcgcataactctcaatatagccctgatcgtttaagattatctgcattggtttactccttgtatcggcatacgccccaaacccacgcaatagagcctccggaaggattactcaaaatcgtcaatgatgcgttggagccggatgaattacattgataggcaagccatttatctgcgcttgtaagcctcatgtgcgtgccccatccaactgggattatttgcgttactgcgtcttcattgcttccagcccagccgccaacgatcaaatatgcgtatttcgcgccatttgcaatagttgccgtgccgttttttaagctgccttcccacaatgtttctgctgtatgcgcgttcggcaatgctctccaatcataccattgtccattggtgaatgtacgataataagtcattcccatataaaatgtgaatcgctgcaaatagttgttagtcgtagatctggtaacttccattgtgccccatccagaacccgaaggcccattttgacagttagaaagatttatccagtatgtgcctattatcgctaaatcgtttaaatttccggagtataccccgcctacaataaaattatataaggcatcgcctctagttgccgcgccagtaccgccattagcaattggcacgatatctttatttgtgaacggatgagaccagccgttatcaccccagccattatttgggtcataggcttgcgtccatatacgccctttttgtggaaaaacttctttcagctcgacaaaaactttgctgtggtggctccacggtgtatatacgggatatactttacgataagcgtaaaatggacccgaagtcacggggctattgattagcgtagacgcgtcttccgtgcgaacaacattatcgtaattggtattcgagttatacggatcatcgccagaaaaattgatgagcatcaaatccgtcgcgtcacgattccatgccccatccgacattccgccatcaacttttaaattaccccgaatccgcgtattccacgccacgtccagccagtttgcgagctcggccactttgccgatggccgcccctgcgccgcgcttgaaggattgcagcacgctttttgtagacagagtgcgcggaatagataagctgttatacttgtccgccaccgtcacgagcacgtcgtaggtggtggacgcgcctatatttccgccgccgagcacggttttaccgttgttggtaacgttcgctgcggtgccgtaactgctctcggattgctttttgtatcgagctgtaatgctcaaggtgttgccggtgattgcgctgtaactcgcgttgatctccacagcaaaatacgtgcctgcctttttgcggttgccgtctgcatcgcagcggtacacgtcacacaccgctacgccgggctttgtgtagtctatgacgctgattgtgcgcgtagtgctggctttccgtccgcgcgaatccgttaccgtggccgtgaatgtgatgttgcccgccgaggccagtgtgccggtcgtaagcgcgccgtttgtggcagtccatccgccgccgataatcgtgtacgaggtgatgctgctgccgtatgcgccggatgttccggaaagcgtcagctttgctttgcccatgccttttacgtatagacccgtgccgctcgtgtcttcggcgagcgctgccgaaatcgtgcccgccgacggaactacgctgccggggacggtgagcgtgatgcttacggactttgtgccgaggagcgtgctgccggaatatgtatcgcaatagattgtaccgctgcccgccgtggcggacggtatttgacttgcgagcgacaccggcggcatccagctcacgctgcttgcaatgcccgtggcaatcgttccggatgcgctgccgaacgcgtagcgcagtgtgtgcctgtaggcactgtttaccgcaggcgtgttgatcgtcacgcttttgcccatctctacggttgcagcacttaaactcggctgcgttgcgggctcctgccaatccacctcaagcgttacagccgtccatttgagataatccgtgtaagagctgccgttatagatgcagtacgtatcgtacccggcggtgatagatgccgccatgaaagcaacatcaaacgttttggtattatcccacatgggcgctttacagctgccgagcgcattgcctgtgcggtgccctgcattgagcgaggttttaatgccgccctgcgaggcggagttgtagatgtataccgttttggtggtcgctgtgccgtagcccgtctgtccggtcgtcgcggtgagcttcacgctgttgatgatcttgcccttgagcgctgcaaggcccggaaaatacagcacgccggtgcgcacacctgtgccgtcccactggccctgcgaggcggtgccctcgcttttccagccccacttactgtcataatagttaagctgggctttatagctgtttttgctcatcagtcgtccccctcaaactcaagatcaaacgtgtcggcctccgcattgtaccgccacatatacaagcccgtgtccgcgttgccgaaagacaagcttcccgtgatatgcgcatccgtgatatacagcatacgattggagatatacgcaatggtttgaccgttttcgacaaattcgagccggtcgttggaaagcactgcctgtatggcgctgtcgctgcggccgagcgtaattcgcgccccctcaaagcggatatactgttctaaaagccgctgattttccgccaccgtgccgttggtgctgtcaatgagatttgtcacctgcgtaaagcggtattcgagctgatcgctccattgggtaatgagcagctgtttaacgctttcgagctcctctgtcgagactgcggtatcttgtaaacgccccagcgcgtcatacacattttcggtcgtggtggtcagctccgtcctggtctccgtcaccgatgccgtgatgctgtccatgtccttccgcgcgtcgaccttgtaatccacaagctcctgccgcactttgtctgtgcgcttgttggtctcgtcccgcacaagctcgagctgctcgcctaagtctttccgtgcgtcgacttgctgttctgtcatcgtgcggtatgaggtgccgagcgtgtaggtcgcgtcccccggctcgtccacgggcaaatcgatctcggatacaagcatcgatatgggcgttgcgctgcccgggcccgaaaataggatcatgtcgccgagcttaatgcgctcgacggaactgtccacaaggtgcaaatctaccgcgtctacctcaatactgcctcgcaggtattttgccgcctctaaatcggcatagcctgcacgcaggaggttttcggccagcgtgatatcattgtgcacgacgaccttataaatccagccccattttgccaccgcgtccgcatcgtagatataatcttttccgtcgtttgccgcagcgattgtaaggcgcggtgttaccgtgccaaccttgtcctcgtcgagctgcgcgccgagtggaataatggccgtcgcaacgtcctcgccgcgcacggtgtgcagcatgtcgagcaggtttgtgcttgcggtaatccgctggctgtttacgttgccgtactcctttaggtaatccaaataccgcgtgccatcttttccgtatcgtatcacgagatagccacccagacggttaaggagcttatcttgcagcgcatccatggtgctctcgtagtccgattgccggtacacgttgtcggtgctgtttgtcacggtgacttgtcccacggtaaagcgtcggctttcgtccacctgcgcgttgtgcagctcgataagcttcgcaaagtatgccgccaccgtcatgtcatggtacaccgtcagcggctgcacgctgtcgtttaggtaagcgagctcaccctcgacctcgattttccgcgtgctgcgcaaatcccactcgtcgttgagcgcacgcccgcggaacaaaattgcatcatcctgccacagcgttaccaccgtatcgagttttgcgattttgtctgtgtgcgggtgcgtcagcggcactgaaaaggtgagcagaccggctttgttcacggccgttttgcacgtcggcgagatgagctttaaatccgggctgcggggatcgtataacgtataggttataccgctgcggtttttcgccgtaattttgaacacttacaacaccccctcacgccaagttaaaacgacattgcccgtgccggttacggcgacgttattcgcgccgggcaaaagcaacaattcggggatttttacggccttgcccacctgcgcgatgctgtacgctgcgccgccatttatcgccaccgtcatgccttccactgatgccgtaaaggtcggcgagacgatctcgtcgccattgttcaaaactgccgtcgtgcccgcgccgcacgaagctgtgctctcagtctgcgcgtatttgtacgggtcacacaccgctgtgacctcaaacgtgcccgcaccgtattcctttacgccaggcgtacaggcgatacgccccaaataataatggtccgggtcatcggtcagcgtaatcggcaggcgcttgccatgcatcgcagacgcaatctgcgagcacaccgaaagccactccgatgccgaagcgccgcgccgcttgaacgtcagtttgagcgtgcgcagcccatacactgggcgacccgtgacgacctcggacaggtcgatgctgccgttttcgagcggcagctcctgatatttcgttttgacctccggcatttcgagcgaaagatccgtcaagatcataccgaagtccgtatacatatcgttttcgccgatgagcacgcccatcagaccactcccctttcacgcagaactgccgtgccgccctgccgcttgtccacttccggtgcaagtgcacgactggcttcgcgtgggtcgaacaccgcgttcacctgcaactgtatccggctgatcgcgtccgccagcatcgctgcaagcttttcgtcgcgcggagagccgccggtgagcatctgcaaaatttcgcgaagaatcgtcaaaatagcgtgcagctccgtgacgggcatgccgtccgtttgctgcgcgtcatccacaaccgagcggatcatgtccatcagcgttgcagcgccggagacaacctcggggcccgcttcgcccgcgccaagcagagagccgcccgccgcgccgaagattgtcggattattcagcaacatcggcgtgttcatggcttttttataccaagatatgccgaaatgcggcacacgcggcggcacaaggctaaagttgcccgtaatggagatgtgcggaagctttagccttggcaaactccaagagaaattgaaaaagcccttgatcttgtcgatcgcgttgcgcaccgcgtcccgcgccgcattgatcggtgtttcgataccctttttaatggcgtcaaaaattgacgtgaccgtctctttggctgcttttatcgggttttcgatcgccgcttttaccgccgaaaacaccgccgtcaccttagacttgatcgcgtccaccaccgtgccgatcgtggattttatgccgttgatgatatttgaaacagaggatttgattgcattccaaatctgcgttgcaaagttaccaatcgctgtccatccgttattccaaaggttagcgagcccgccgaggaatatttgtccggcattgagcagattttcgccgaatgcactccagtcgccgttgagcgctgaggtgaacgcggagaacagtgccgaaatgacgcttgtcaccgtctcgaacattgtctgcacctgcgtccacaccgcattgataaaagtgccgtccgtctgcgcttcgtccacaagccatttgattgcgtccgcaatgccctgtatcgcaccggcaatggtctgcgcaatcgttgcaagatatgttgccgcatactcccatacggcagaaaacaaacttgtgcccgactgattatccgcgaagaatgagctgaatagagaggataaaccctccaatgccatgccgattacatcgccaaccgcgctgaaagcatcctgcaccgctgtccatgcagcattgattgccgtgccgtctgtttgcgcctgttcaacaagccagccgagttggtcgccgactgccagcaaagctgtaccgacaataccgcctacataaaccacagcgtctccgattgctgtacacactccggcgataatatcaccggcaactgatactgcgtctgcgataccgtcccagatgccgccccagtctatttccgcgttgctcaaagcgctgccaatcgtgccgattgcatctttgaccgcacccaaaacattctctatcgctttggcagcattatcaaaaacgtgcatgatgttatccgcaagcccctgcggcacattcaggccgcttacaaggatcgtctgtataccgctgagcgccgactgcaacaatgccggtgccagctcgaccagactgcccgcaaacgccttcagcagcgatgcggcagccgacgccatactgggcagaatcgtcgtcacgagctgtgggacggcctgtgcgaccacgggagccaagccctcgaccagactgccgataccgcctaaaatcgtttctacgcgcggcagaatgttctttgcggctattcccacactgtccacgaagttatccatcagcccgccgaagtcctgtgtatcgtccgcaacgccgacgagcaggtttttccacgatgctttcatcatgccgacagagccctgaatggttgtactggcttcctttgccgtcgtgcctgtgatgcccatttccgtttgtacaatgtggatcgcttcggtgatgtccgcaaagctatctatcgacagatctgccatttcaccgtttgcctgcttcaccttgtttgcatcggcgataaggcgctccatttcttcttttgtgccgccgtagccgagcttgaggttatcaagcatcgtgtagttctgtttggcaaatccctgataggcgttttgaatgtcgcgcatattgctgcccattttgttggcattatcggacatatccacaagggcttggtcggcatattccgccgctttttttgtgtccttacccacgctttgcaaaagcgatgcggaaaagctcgtcaccgtctccatgtattcgttggcggaaagaccggccgtctgaaatgctcggtttgcgttttgcagcactttgtccgacgcatttccgaacagcgtctccacaccgccgacaagctgctcataatccgcatacgcattcagcgccgacttgccgaccgccgccaccgccgccgcagccgcaccgaatcccacggctgcggctttcgctgcggcggtaaacgccttgccgatagagcttgccgcagactttaatccgcccgcaagcgcgttgcccatcttctgccccgactctttgccgctcgtctcgactgccggggctaaactctttgagagctgcgcttgtataccctgcattgagggtacgatctgcacatacgcctttgcaatttcagttgccatttgcttcaccccctaaccgctgccatgcggctttaaagtcttccggcgtgcggtagcccgtcacttcgtcgtgcgtttgcggcacttctataaacgcgttcagaaacgatttggggcggtttttgccggtctgcgccgccttcgtctttgcccatgctaaaaaattaagcgcgtcagctatggacgccaaaagtaaggtgtccgtcgctgcacgcgctcccgataactttattttgattctcgaatcgtcccgtaagcccgccgcgagcgtcgccagcatgggcaccggcagcgcccgcaggtcaaacaccttgtaggtttccgccatgtcgcagatcagggcgtccttgtccgtcgcgatcatgcgggcaaggacgatcagttttttcccgcgtctccgatcgcgtccatgacctcgcggatacagtccgaaacggctgtgatatgcactcgtccgtcatcgccacgtaggaagtcataaaggcgttttctctgctccttgccgaacagcatcacgcagacgttggaaaacgccagcggattgtcgttcacggtctccgccagcgcgtcaacaaattccatatcctccagcactctgccgtcaatttcaaattcgaagccgccgcttgtcttgcctttaatcatgatctacctccttatgccgctgccggcttgctcatatactcgtaatgcgtgttgcctgtgctgtccggcacggcggtcacggtgacctcgtagcctacggcgctttcgtccgcatacgtcacgtcgcccacctcggtgattgtaccgttcggaatgacgacgcgcttcaaaatgccgccgcgcataatcatgtcgataacccacacgccagcgtcgagctccttgccgttcgctttgacggtcaagccgttttcaagatcgccggtgacgttctcatcgagatacaccgctttcagcacgtcgctgttcagcgcttcgatgagcgtaaatgcgaacgtgtcggttttctcgttctgataggtcagcacgttgtcgccgccccacgctttgatgttgccgctttgcggagagttggagttcaccacgcccgcgtcggacgcgtagccgagatttttatacgcttcggtgagcgcggttttggcgtcggtcggcagcgccgtgccaagcggtgcgcggtagatcgcgccgcctactttcggcttgcctgtgcttacattggttgctgtgctcattattcatgctcctttcactcgtcgaaataaacgagatcgtacaccgcctggtagcggtatcgttttgtcgtcgtgtccgtaaaattgtaatcgctgttaagccgcgatgcgctgacggcatccagctccgcggcgctgtccatggcggctttcacgcgctcattgagccttgcggcttcatacatggacggcgcgtaggactggattgccagcatcgcgcggtcaatacgctcctcgcggttgctgcccgttttttcgagcaatataaagcttttcggcgggtctgccggaacttccagcaccaccggcatcgaaagcttttccgcgagatagtttttgatgatgatctcaatcatgattatctcccgagggctttaagcaacgtattttcgcgactgttttgctttgcggcttctgccgtttccgcaaataagcccgctataactcggctgcttgcttggtacaaatctgtgctgtatccgcttccacaccgtgcgcgtacctgttcggcttgctgtttcagcatttgtcccatttcttcggattttaaaagctgccggataccgctgctgttcagttcaatcttcaccttagccataccgttccaccttcacctttttgttccagtgcagcgggatcatcgcttcgatgccctccgtcacgtcgccgtatgtgcgaaaccgcttcccgaaaaactcgaccgtcacgtcgtgccagtcgtgcgcgtcgcctttcggcagtgccagcgtgtacgcgagccgcttgccgtaaagctgcaattcgttcacaaggtcttccgctgtcggttcgccgatgagcacgttgtgcaccgtctccgacacttctttaaacaccggcgcgccgaacgcgtcctcgccggtctgctgcttttggtatagtataacgtcaatcccgcgtatcatcgcataatccctccaaagggctgcgggcgccgatgcggtccccgacgccgagcagcttcttttcgagctttgagagatacagctcgcccgcgctgccgctgcccatcgtccagctctgggagtagcccatagcgctcaccgagccttgcgtggagccgagcggataaagcggcgcgtcgttcccgccgccgtcgcccagaatgcgccgcaccatgcggcaggaaacgagctttttgcggtccgcgtccgccccggcgctatacgcgtcgatgatgaccgccgcttcctccaaaagggatacgcagcgacctctttcatcgtcgcttaaatttcggaaccccgccgcaacgtcctcagctgttgcgtacagcatcttagcccaccgcggtttcggtgcgcttaatgtacagcgtctgcggcttggataccgtcaggccatagactttacgaccctgcaccgcgctggcaccgatgaacttgccggatccgttgaggtcctgcaaatgcacgggcacctgccactccatcacgcggtggcaccagttcgggtgaccggcgataaactccgtggttgtctttttgctcgcgacgcgcgtcgtgctctcgaaatccatgttgttggactcaaacacattaaagcccgcgatgcgaccgatcacgccctcctgcacgagcgtctgggagaggtagccctgcttgatataatgctcatccagcatgaggacttcgaggtactccggcgacgcaatgaggaaacggccgtcggcaggtacgcccttgcggctcagtacgcgctttgcttcgagcgcgagcttgtatgcggtggtctcggttgcagccgtctttgtggcgctgaccgttgcgccggaagcaccctcgagcgcgttgatagacgccttgtcgatcgagagcgccagcgaatagcctgcgctgtccagacgttccgccacgatgccgtccggcacgctcgcagcatcgaagccgtcgatgagctcgttcacggcctcatcatgatcgatggaaagatcgatatacgctgtcgagccttcggaagcgtccacgcccttcgatttgttgtaggtcttcaccgccacctcggtgtcgcgcaccgggatttttactttgcccgccttcgggtcgccctcgtagcggttgttgaaaatgagattatcacgggtaacaagctggctgcgaagcttcgcgtctaccagagttgcccagcgttcctggtttgtgtgtgccataagatttctttcctttcgtaaacaaaattagattttcaaagacgggtttaaagcgccgaacgccgctgccacgccgtcgctttcggtgccgccgcgtgcaccgggttcaccgccgtctttcacggcgggatagccgctcggcttcgcgaatttcaagattgcgttcgcctgcgcggtgcaggcttcttccgtgtcgccgctcaaaagctctgccggcacaccggtagcagcggagactttctgacgcaccgtgcgcagctgctccgcctttgtaaaagcatccacctgcttctgcaaagcgtccgccttctcattcgccttttgcagctcggtcttcccggcttcttccgcctcgtcgaacttcgccgctttcgctttcagcgcttcatagtctgcgtatttgccgcgctccctcgtcagccggtcctgaatgatcgcgttcatttccgcctgcgtaaaggtgcgctgctcgttttcctgcgtttcggccgcagtgccgttcgtttcctggttcacagtttctgccattttggttctcctttccggcttttccgcagccgtcgcgtaattttaggtatgaaaaaagcagcccggcgcataagcgctaagctgctttatcaactgtgtttaatttttagaactccttgaattcaacggaaatatccgtgtcactttttttccaaagagaaaatacaaattttgcgttagggtgtttcttctctaaaaagtctgcatcggtacttttcacccaatcacgctcaaaagcatttacttcttgacttggaactaaccaaccgctaaaatcttcgccttccatcgttggtgtttcaaagtctcgtccttcgcccgcaaagccaaagaaaacacaaccaaaattacgggctgtatcttgaatcaactgccaaaagcgattaaattttagactttcttgcgttttcaacccgagcattcgttgtacctcctttcaaaatcgttacgaactcgccggaagaattctctataacaacgtcattgcctttcacatggaaaagcaccgggtattcttgccctcgccactcaccgtaaaagcgctcgtctgcatcatttacaacggtgtatatgatttgcttcatttgctcacgagcttcggcgcttgacggatccatgccaaaatcggacgcatgttttccaacctttttaccaaactgcgcatccgtcattttaagtaaatgcggttgataacgctctttggttacaggattgaggggcagtatatcaaaaataccgccatcatcgtttttctttattttatcacttttctcctctgttgtcgagagctttttctcattcctcgccgcatacgccgcccttttctgcgcattgatgcgctcgcggttttcggcgtagtggatgcgcctcagctcgtttacgtcgctgccggcatcgcggtaagccttgaggtatgcgtcggggtcgtagccctccacgttcacctccgggtcaaaccgaatggcgtatgtacagtcgcagttcgcgtggatatgctctgcgtgcccgttttttatggctttcttactcgcccgctgccacccacgggaggccagcgtcatgcagaacgcgcaggtgtcgccgttcggcacccatgcaaattcggcgccgtcgcgcaaagcgtttttcagcatcgtgtcggctccggcacgctttacaaggcggctcaccccgcttttgagctgcggcgtgctggtttttgtcgcgttgaccatgcgtgccacttcgccgtactcggcggtctctgcgggctctgccgcaggcacgtgcgcgccctgaagctctgcgagcgcgtcatacatttcgctcgcaagcgctgcgctgccttcgccgtacttcgtcacaagcccatacgcaacatctatgagcttctggctgtcagaaacgccgtactgatctacatacgcctgcatacagtttgcaaccgtggtgtttaaccgacgcagcttgcctatgtaactaagccatgctttcgacggtatctgcttcatcgttcaactccatcaaaagctgctgtccgcgcacgcgctgctcttgcgacttgatacgccggatgtctgcctggtcaaagccgatcatctccaaaaacgtgtcggtgctggcaaattcctgccgtgccgatgcgatcttgatcgctgcgtccgccgtcaccgccacgctcggcatcgccgggttcttaaagtgcgccatgatgccgctttcttcttccgtcagctcgtcaagcgtcttgttctgcgcaatggcctgcgccatgcacgcgatcgtccgcagcgcgtcgccgttgccggtgttgagctgctgggcgagcaaaacgagcgtctggctctgggctaaaattgcgtcactgctggtgggattggcgtcattcacaacgcccacatcggtcacggtcaggcctgtggccgccgcaaactgggtggcggtcatccgcattttctcggtatgcgggcttaaattgccctgggccagctgcccgaataccggtttttcaccggtctccgggttgctggtggccgccagcaagctgcccacgtactgcttgaatttatccgatacaatcgcgtcatactggtcgtccgtcacgcccaaaatatatttctgcggggtcgtgtcaaactccagcgcaatcgtcgcattcgccactgtgcggatataatcgtcgatcagcgtgcgaatgggctttttcagccgagagcgcccgaacggcttgccgctcgttgcactccagatcatcggctccatcagcggacgacccatgcggtgcatcatgcgctgcacgcgccagccgtcgcgctcacgatgcagcaccagtactgcatcggctgtgtacatgttgacaagcttcggcacccactcgttgctgtattcctcgtccggtatcgtgtcgataatggcaagcccgcagtcgatgcgccccttttcgccgttccagagtgccgccgcagtcgcgggcgaatgaaaccgtatcttgcagccaatatctgcatcggcggaaagcgttgcgaacacgcagccatatttcagctcgtcgcggcacgccttaccgtactccgcgatgagcctgttatcctgcacaagcttactgagcccgtccaagctgcccgccgtgccgacaaatccgtcgaacatgctgcgggcggcaagcacatccaccgctttctgtccccagttgcagccgaccttcagcttgttcaacccctgcggcaaagcgatgccgaggttcacgtcgctaagctcgatatgtccttcgtaatatttgtctttcgtgtcgttcttgtcctggtgataggcaaacacattttgcagttcaatgagcttctgctgttcggctacgctcaagcccggcaccgtgccgatattcaaagttatcatcgtctcacctttatccaattttcatcctccgcgacggatctcgcttgcaggtcttcgcaccccagagtgccagggcgcaggcttccacgggtaagctgttctcgccgccgaagccgtaccctccgccgattgggcgcttgaccgccgtcacggcgctttcgttcagcgcctcctgcggcttgtaccatgtcagcgtgttttcgttcacggcgttcgtaaacagccccaccgccgcgagcacgtctttcacgcccgggcgtatgacggcgtttttcgcccgccaaacacctttgatgcgctcgaccagcacgtccaccccgttgcgcccgtcgatgacgacgcagctcgcgcggtcgtaccgggcggaaagccaatccaccagccaaacaagtccgcgccccgagggctgcatctcgatgagcgacacgcgcgccggtccctcctttgggatcaccgcgccgcataaacacaccgccgaaccgtccgcagcaaatttcacgccgtaggcggttttaccttctggcttttcctcattactcgcgcaggcttcccacgccctacggtcaatggcataatccaaattttctgccgccactgggctccaccacccgaggcgttcacgggcgaatccgtcacggctcatacttctcagttcctctgcggtgaattcttcggtgaggtgaatacctaatgccggatttgtctgataccatgtgttcgggtcgtctacaggaattttttctgcatcatctccgtccacactccattcatgccaggcgtcatgctctcccggttcctgaaggcaaaccgtgcgccgtctgttgaaaacagtgccgggacatcccggataaggcggtgtcccggtataaatgatctgtctggtgccggtagccgatgctgccagcgttgccatgatcgcttccacttgatcgtccgtcagctcctgtgcttcgtcgtagaccaccacgctgataccgtcaaaaccgcgagccgcctgccgagagcgggcagaaaactcaatggagccgccgttttggagtaaaatagcttcttccccgtttgtccgccggataccctgcaccatgtccatgatctccggatgtcgtttatcggtgaacattcgtgccaaccgattaaagctctttttcgctgtccgaacctgatgcgctgtgtgcaagatcttctcgccatttaccacaagaccgtaaaattctcgcccctcaaggcagacatttttcccattctgtctgggaagtgccagccctgccgaagtcatggtatatgctccatcggcacctttcccgagccaacagttcaagatcaactgctgccacgggtctagggcgttgccgtaagccgccatgagagctccggcgtcttcgccgtctgtccaaacccgttctggctctattctgatcctcggtttctgtgccccggtcttaccgcccatcttcatgcaccctcttcctgttaagtaccagttccagcacattctcgctgttatcctttacgacctgtgcagcctgctccggcaaaacgctcagaatgatttgcagccctgtactgtaagatttccacaacgcttcataagccttaaacgccgggttttctcggacccctgtttgcccgccgccattatcatactccgtggtcagcccgtctcctgcgatgtcttctctggcatcttccagcttgatctgcatccagcaaatgttttcgatcacaggcaatatcacgccgatcttctcagcactcaacccataatcttcacagatcttcagcaattttcgttgctgctttttacaccgtttattgctctccgcgcacccgcgaacagaagtatccgctattgctttttcccttttttccgttctgaccaccccctcctccttccccttacgggggtaaatcggcgctggacggcgatgggtcgctggtatgggtgcaggggtaccctccccaccctcggcaaacttaccagtttccgtcgctgatttttgggtatatctttttctctttcttttcctcgaacggatttcctacttttgcgcccttctgctgattacaaaaataatgcgctgcctgcaagttgtcccaatcctctgccgcagctcgtgccgaagcgtaaccgaactcccgccaacgtgccacgggtctgatctcatcgaccacaaacgaaagcggatgctgcgcgtcgctcggctcatcgtaatgtatcggaccgaaccgccctttacatatcccgcatggcgcgcccatggctttcagcctggcacggtgtttcctgcgcagtgtaccgttcgcatatcgcgggttactcatctccgcacccgctccccaagccgtctacgcggtcctctgatgcgttttcactctcaataagtgaagctaccctcgcaccgtccgaaatcgccgtataggggcacacagagagcatacagaagcatgtgccgtctaagcattccgcccaaacgcatttgcagcccctcgggcacacccggtattctcttttcacgtgcacccctcctttcggtttcgggcataagaaaagcacccacgcaacagcgcaggtgctccttgtagacttcctcaattatcattataggcggacaaaacggacaaagcggacaaatctcaaatttttttgaaaattctcgaaaattcttttcgcagcgcttctggcgacttgtaaccgctcatctcacgcataatgaccttccacctcgtcccgtgcttcatgacacatcgggcgagcttctgagggcggtaggcaagcctgcccacaaacgcttcgatctccgccttttgcacttcaagttcccgaatgcgttctgcgtgtttcgggttcggcatcccctgcacggtaacgctgtgcaggttgaacgggaactcgtccgcgctcgcctgcaccacgtcgctgaccgccgcgctgtctttcgctttcagctcttcgatttccgcgcagatgtcggggtattgctccaaaagttcttttgtcattgcctgcctgcctccatcattgatttagcgtcatctgctccggcgcgaactctgcttccggaatatctcgccacccaattccgagataatctaaaacttttccccagccatacggtgttccgttttcatcaaagcaacacctattcatccaaaaatcccattctttgtagttccgttcccgtagccgatcgaatcgatgaggccgcttttcgagctgaattccaaatccacacatcgagcatccggttcgctgctctccagaagtatacaaatgaccatcttcatccttcagtatgcttccataaatctcagggacagggacctttaaatcaagtgccaactgtaataaatcctgtctattaaaaattgcaaatggtgctgaacgaatggttccctttccaaagtagttacagccatttagcattaaagacttctcacgtcttccgccttcggatgccatcagccctaaatacggtacacaattgtgctctttagcccaatcagagcacggtttttctttgaggtaatagcaacacttcgaggagactttaaacggtgcaatttgataattcacgccttcttcttcattttctaatccgccgaatttttcgagccacttctgcgcaagtttcatttttgaatgcttttgaaatccaccatattcaccagtttcgcctgtaacaattgcatgccttatggttttattattgggagttgggttttgaagcaattcaattttacgggcgatttccttggagagtacagggaaaccaaattcttgaattagtttttgcttattccatcgcgtaccatcagttctaactgctggtggtagtgagataactccaatctgtttgtggattttttggatactaacatcttcgagcgaagagactgataccgctggcacatctattcctattgatttcaagaagaagaacagtgtgatactgtcaagtccccctactgaaacatagcaatccaagtccctttttccacattcattatagaattcccatgctcttatgcgcgcataattcaccttaaattcatatggcatactttgttttactcggaaactggcaattttgttgccggtgttgagccgtttatttttttcaatgcaattttccgtcatcgcctgttcctcccttcacatcgccacaaacgccactgctgcggcagtgcctaccgctccaagtaccaccatggctttcacgcagcgctcaagcccggcgatattgtctgctgcatcgtactcccgcgacttgcgcatcacgatgcactccgtgagcgtcgccgcgattacgagcacgaccaagatgattttagtcttcataactttctctcctacttccttactctgaattttgtcgtaatatcctgtccgtttgccggtggagaactccactttaccgttcggctgaacgaaaaaattctcataccttgcgcgaaagtaatattcagtgcatcgcacaccgctttggtttcgacccattcgcccgaagtcaaggcatctaaaactttcttgcgttcttcagtgttcacgtctgatcttcctttcatgttttcttttcacagcctgccgcacttcatgatagaagtacaaagcatccatcgctttggctttgcgctgaagctcgtcttttctctggcggcagtagtcgcggtaccgcttgcaagtgctgtggcatgtcccacgctcatcggcatatcttcccgggcactccctcgggcagcaggtcaggttcatggctttccctcgctttcgatttgctccagtccgcagatcagcacggagccgtcgtttttcttgtcggttatttccgcctggtaaaagtcgctgccggtcttacggtctctgcggaagatgatcgccgtcagctcgtaagcgctgccgctgtactgcaccgtgcggttcatgtgccgcttaacttcccgcagctccatcacagctcctcaatgcggatgtagatgcccggaatcttcgcccaaaacttttcggtaatctcggacgccaccagcgcgtcgtctttccagaacccctgctgcgtcataacgtccttgagcagcttttgcaggttgtccgtgtcgggcttcgatgtgcggtactctccatccgcatgtctgccgtttgggaagcaccacttcgtcgtcagccgtacgccgcctgtaatcgggctttcgggtctgtgcctgccgatgtaagcggcgagtttctgtctggcggccttcaggttatcgtcctcgtagaactttcgtgccgaccagttcacgcgcttctcctgatgcgtcaccgtcggcggcaccatcggtacaaaaaactccaacgtcatttatttcacctcgttaatctgctgaatttttgcttttgaagaaaatttgctttcgtcaagggtaggggaagaagtcgtgtgggggaacctcatgacccccacacttcttcaccccttgaccgtgagagaaagtgaaacggatatatatacgtagtatatataggtgtgtccgggacagggacaaagtcgagtaattgtccctgtccaagctgtattttttgtatagagacaaagacaaaatcgagaaattgtctctgtccaagctatatttaaaatatacaaacaaggacaaaatcgaaaaaatgtctgtccctcacaggggcaaactcgagggacagttgtctttgtccctgtccctgtaattaaaatacattgaattcgaatggtttttagctgttttttgcagatgaaataaataagttatgcttattttattcctgcttcaccctctgaaatccagtacttcttcgcttcctccaacctacgccgcaccgttttttcgctcacgccgaggtactcagagagctccttaacgctcgccttgccgccctcgcccaccgcttcaaacgccgtgtcgagtgatgcttcacgctcttttttgcgctcctgcggggtcttcttgcgtccgaaattctgcttccagccggtgcccttcggcgtggcattttcggcttgcaggtcgagcaggatgcccgtttcgtccgcccggtggatcggataatcgaaccaaaagttcttcggcgcaaagcgcggaaactcgcgcagcgtgccttctacacgccatgcggactttgcgtttgcagctgtacgcgcccttgacacatcgccgagcattaagttgtatgacgcttcccgcaggtgctttttgcacagcgccatcatctgcgtcgcgctcagtcggtcatcgtctccggcttcgtccgccttgcggtagcgcgtcagccagtcgaggcacacggcgcacaccgcgcggttctcctgctgctccttgatgccgtcggtcagctccagctcgataaggtcgataagcgcatccggatcgcgcgcaaacacaccggagccggacgcacggtccatgctctttttgccgccctgcccgccttttgaatggtggtggcagtagatcacggcgcagccgagctccgtgcacaccttgtcgaactggttgcagaaatgcgccatctggtcggcgctgttctcgtcgccggtgatgaccttgtaaatcgggtcaatgacgatcgccatgtagctcttttttgcggcgcggcgaataagtttcggcgcgagcttatccatcggcacgctgcgcccgcgcaggttccagatgtcgatgcggtcgatgtgctccggcgtaaagccgagcgccgtgtaaacgtcgcggaagcgatgcaggcaggacgcacggtctaactcaaggtttacgtatagcacgcgtcccgccgtgcagggaaacgaaagccacggcttcccctctgcgatgcagcagcacagctcgatgagcaaatacgatttgcccgccttactggggcccgccacgagcatcttgtgcccctgccgcagcacgccttcaataagcggcggcgcaagcgccggtaggtcgtcgaagaatgttgaaagattttcttcgtccggcagatcgtcgttgacgctctcaatccagtcgcgccattcttcaaacgagcttttgccgatgttcgtatcgaccaaaaactgcttgtgctccccgcgcaccacgccgggcatacgcgaaagccgtgaaggattgcggttctgcttatcgatgtccagtccgttttttgcacagaccttgtagagataatcgacgcgtgcgcggtattcttcgtagctgcccgcatcaacgcgcacaatcgcgtgcagactcttgccgccgctgtacacaaggcaggcgaccggcagctccaattcacgtatgacggcgttctggctcgcgatatccatgctgtcggattcaacaagcgcatagcggtattccgtgatattttcgtttttcacccccttgccgtctaagggattgaagcggatccacgcaccgacggcggggttatagtcgccaagcaccgcaccgaggtcgtcgccgcacttatacagcgcgctgcataattcgcctgccgtttgcgtgtagctgccgcttttcggcatgtacttgccgtctttctcccagctctcggtgacatagcccaccgtgtccgtgctgtcaaacagcgtttcgagataccgtatcagctcggcggcaggcttccacttttccggctcgtgaatgtcctgcgcttcaatccagttcttgtccaccacaacaaattcatcatgacggtcgatcgtgtcgttccaatcgagctcgtggtctgcttttgcgggcttgtagccgttatccagcgccattttgacgagcgtcccggcggtgatgcctgtacccgtaaacgtgtcccatttgcgctcacattcgcccggatgataccgctttaaatctcggcggctccaggcatcccagtccgaagccttgtaccccgcgtccttgagcgccatgccgatgcctgtccaatccgtataatcgagcagagcggggtcgatatagccgagcagctccaaaaggttctcgttgttatactccatttacgcctccggtctgaagcttttcgggtcaatgccgtacggcgtgcgccagttgttcgcggcgatgcggtcgatcatgccgcgggcggtctcgaacgaccatgtgcccacgtgctgaaatccgcgcccctcgaggaatcgtatttgctttggcgtcgtcagtcctgccgtgcggcgcttttcgagcttatcgaggatcttcgccgccttgcctgcgttgccgatctcatcggggaaaatgccgaacttttgaagcgccgagatttgcttttcgctcggcggcgacatctcccacccgaacgccggcacatagccggaaaggtcttccgcttgaatggacatttcaaattgcagcggatccacaagccttttcttgcggctgcgcatctcgttaagctgctttgcaagcgcttcttcgcgctgcgctacaacgtcctcggatgccgttttctccgcttcttcaaggtcaacgggtgcgcctgcggcttcttccatgttgcgcgtcatctgctgcgcgacttcttcattttcgcagatgaggttcgccgggtggcaaagctcgtggcgttccgtgtgccagagaaagtccagtaaaagcaggtggtctttgccggggtataatcgcgtgcccctgcccaccatctggctgtataagctgcgcaccttcgtcggacgcagcaccactacacagtctacgctcgggcagtcccaaccttcggtcaagagcatactgttgcacagcacgttataatcgccgcgatcaaactgctccagtatctccgcgcggtctgtactctcaccgttgacctccgccgcacaaaagccacgctcgttcagaatatcccggaacttctgcgaggtcttcacaagcggcagaaacacgaccgttttgcgatctctgcaatacttcatcatctcgtccgcaatgccgtataaatacgggtcaagcgctgtgccgaggtcggcggctttgtagtcgcctgcttgtaccgatacgccggaaaggtcgagcttcagcggcacggtcagcgccttgatcggcgtgaggtagccctccttgatcgctttcggcagcgtgtattcataggcgagtgactgaaacaccgcgcctaaattcttcatgtctcccctgtccggcgttgccgtcacgccgagcacctttgcggtgctgaaatggtccagtacgcgctggtagctgtccgagatgcagtggtgcgcctcatcgatgatgatcttgtcaaaatagtcgtagtcgaatcccgcaaggcgtttttcgcgcatcagggtctgcacggaccccacgacgatacggtaccaactgccgaggcagctttcctgcgctttttccgtcgcgcacaaaagccccgttgccatgcgaatcttgtcggccgcctgttcaagcagctcccctctgtgtgccaggatcagcacgcggtcgccgtcccgcacgctgtcctcggcgatctttgcaaagacaatcgtttttccgcagccggtcggcaaaacaagcagcgtgcgatccacgccgcacgcccactccttttcaactgcctgccttgcctcctgctgatatggtctcagctccatcagaagtcacccggtgtaaagctcggtgtcggcgcggcgggtgacgtttccgggtctaaaaagcgcgttacctcgtttgattcgtgttcttggttgtccttttcgcttgtccatttgcggatgccgatatgcgcacggccacgtgcaccgggtacggcagcccagttcatcttgagcggctgcccgtgcttgcgctgcccgatgcaggtgaagaacgcgcacagcaagccctcgcagcgcgtgtgcagcaaaaggttgtgctgcacggtgactacgccctcgggcgtcaccacgtcaaggtctaagattgccttcgggcagggtccgatcttcgcaccgccgttataccgtgcgcgggtcagtttgcttacggtaaagctgtaatcgccctccgggataattctgaaattactttcgttttctatggtgtcttcccagtccattgctctttcgttcgttgtgtttgccatgatctgtttctccttatacgtcaaacggtaaatctctgttgctgcggattactgaaaatactttcggccatgcgccgatcagcacgccctgcacgaacgcagggtcatagctcgagatcggcgtgtcttcgggataatagcccttctgcccgatcgccatttgaatttcctctgcggtcacgtgctccgggcgcatgaggtctgcaagcgctttcggcacataagacggaatgctgtacgcttcttctgtcggtgtctcgtccaatacggcgttcatctgctgcatcggtacggctgtgccggtcggtgtcggttgcgctgcctgtatcggcttgccgccgatgcaatgcgcgatctgcgcgtactcaaacggcagctcatccgccagaccgaaacggttcttcgcgtcccagcacgggtggtgagacgtatacatgacgcgcttgccgccctgtgccttgaacttctgtcctttgtcgtttgtctgcacggcgaacgtcttgtagttcgcgaacagcaccatgtccgcccattctttgacgagcggcgagatctggctgccggtcttcttgccgagcttcatctcgtagcggtcatacgcccccatttcgtccggctgttcaaatttgcgcatctgtgcgtgcgcggtcagcacgacgtgtacgcccgcctgcacgatttcctccagactgttgagaaaccgcccgaattcctctttttcgtatatatagccgttaccgtagccgaagtcttcaatgcccttcttctggtatcggctgcaaatatcgtcgatgcacagctgctccgcccagtcgatcgtatcgatgatgagtgtgccgcacacctgcgggttctgcttgacgtatgtaagctcctgccgcagcatctcccagcttgtgggcttgtccatgcggcgcacgtccatatatttcgtactgccctcggtgtcgatgaacagcgggttcgggaactgcgcggcaaaagtcgatttaccgatcccctccggcccgtaaatgacgacttttttcgccgattcgattttgcccgatgtgatattcattagaattctcctgccttccattcttttttctgcggcacttcgcccttgacatagccgtcttcaatgatgatcgagcactcgccgccggtgctgacacgcgttgcaatcgcctgcaagccctcctgctcaagccatgtgccgaagtcctgtaaggtctccgtgtccatctgttcaagcttatcgataagcacaaacccgcagttcgggttcagcttgcgcacaatcgcggtcgagaccttgagctgctcgctgccgctcatgctgtcccatcggtgcccgttgtacgtcagttcgccattttccacggataagcccggcaaaggcagcgacgcatttttcagcaggtcaatctttttctgccgcacgtcgttcagctttgcggtcatggtatcgtactcggcgcggtgcgcgtccgcatcttcctcggctttctctttattgaggttcgtgcgcaccttttcattgatgacctcgatgtcgcggatattctgctcgagctctgcggtcgattcatcgtgcagatcttccgcgcttttcagcgcacattccaggtcacgttcggtctttgcaagctgctgactgtaccttgcaagctctgcgcgcaggtcttctactttcttcgtcaagcgtttatgttcttcgctgattaaagtgacattcatgcgtttacggtggttctcaccgttcttcgcgaggatctcctgctgcgcccgaatgagttcgcttgcggaaatcggttcctttggtgcatccgggtaatacggcatctctttcgcaaacttcgctttctggtcggcaatctgcccgattgcacggcggcggttgtagaggtcgttttcctgcacctcgagctccttgagctgcgggcctacgccgatgatcttcaaaagcacctcggctttctcgcgcgaagacgcttccataaatttcggcagatcaatcgcgagttcttccacgaactcgttcaagagctgctggccggcgcgcttgccggtcgggtccgtgaccttgaggtcgctgtttttgcccttgcgctccacctcaagcccgttactcatgacaatatgtaagtgcggcgggatcaccgacccctctcttacggcctgtgacgggcggtaacggtcgccgcccagtgcccaggcgatactgtccagcacggaggttttgccctggttgttgcgtccgccgatgattgtcagcccgttttcggacggctcaatcttcacggccttgacgcgcttcacgttctcaatttcgagcttgttgatcttcatcatttcttcaacacctcattcacgaatgtctgctgctcgatggtgacgtgatccgcagcatacttaatcatctcgctcgcaatttgcgtcaaagagatgtttgtgtccatgtagatcttctcgatgatctcaatcgcttcgtcggtcaggcggatacggttctgcgcatcgatatgcgccttcggtgcgatttttgtgaataccagcttatcggtttttacagttgtacgctttgtcatgttaaaactcctccttgagcacgcggcgaatggcgtggtttctggccttattttcgatttctgtcagcttatcggtcgaaagcttttgcttctgagccatgtaataaattacggatacaaccgcgccgtacacggcagttaaatcatctccgagtttaatattcgcggttacgtcgacgccgccgtccgggttttgctctgcgagcaagaaagaccccttgacattctcaagaattttgtctatactcaaatcagagtgtttatctgactctttcgccgtttcagctgtgccagcagccgaagcggcatttttcttttgaatgagcttttcgtaaaggctctgggtgtcgtcgcgcaaatccgcgagatcgtcggcgaggtcgctgtacagctccgtttcttcgctgttatccgcgacgttcatcgccgctttcaacgcgtccgccatgccgtcgaaggcggcttctactttgtaatacaggttcatgcgtttctttcctttctttttctgtacgcattgatgttcacgatattcccgcacgaccgtgcggcttttcttttcctgcgctgcgcggcgacgagccggtcgatagcgctctggatcccgagcacggaccccgagaccgtcccgatcagcatcgcaaagccgagcagcttgactaaaatcatgctttacacttccttccagaatctaaatcttcgggtgggtcacgcgggtcctgccgtaaccttccggcttctcgccccagtcaaagtttgtcagatgcaggccgtaagtcttgcgccacatcatgtccagcgccgcttccacgcatctgcggttctgcgccacctgctccggcgtctcgtctaagtatcgtacaatcaccgtcggcgtgccgaggtcgcgctccttgcgcttcttaggggctttcttcgtggtcgtttctttcatataaatcacctcttttctttttatgcggtgtcggtttgtccatatcccgcagccctcccacctgccgcccgttcacaatggcaatcacttcggcgcaaacaaaatgaaatcaagggaggtaagttccgggcggcatggggcaaggctgcggggtgggttaggtcaatttccttgtacatctccgtttcttgtggtaatatggaagaaaaaggagattttttgtatgaatatagactttaccatcgagtttaaagatattttggctatgattataagccctatttttattgctataactacgcaatatctcattgaaagacatcctggaagttatgagcgcgaaagatatgaaaaggtcgtgttcccgatttttgataaactggaaactattctctacaagaaaaatctttctgatgaagatttaatacttgttaaagaatgccgtaaaattgtcgacaaaaatcgtatgattgccggaggacgcttgctgcattgctttgctcaagatgaaaagaccaatttcaaatcgatgtcgcggaaaattgacctcgaatacgatttatgtacgcggaaacttggattaccacttcgccctattgactatcgactgaaccgttctcgtggtgtacaagtcttttttctgtctttgtacatatccagacttttgatctcatccggcgcccttatttcctttgctttcatcatctatcgcttactgcttcaaattctctgattacagcaattttcttaaaatcagaaacataataaagcttaaagcgataaactcgagtacatctaatagtcgatacatttcctcccctcctctcactctttaccacaactcggtatcttttagagttactcacgcgcaaaaaaaatttctgctgggttctgaattttaagcagcgaaatcatcttatcgatttcatcactgccgaaaacgccttttttcatctttccatagaacgttttaggcgtgatgccgatagcttttgctacgcttgcctgcgacatattgcgcttggtaatgatgccgcgcagttcgtcagtctggatcattttttgtatcacctcttttagtatctttttaagctactttgagtatagcacgcacaaagtaacttgtcaagatatttttttcttgacttgtaactttttcgtgatataatgaagtcgaacaggaggtgaattaaattgaccaaaggagaacgtatcaaagccagacgcgaagagctcggcatcacgcaagttgctttagctgacatgataggcgaaagcaagcaaaccgtatataaatacgaaagtggtctggtttccaatattccttccgataaggtagaactcattgctaaagctttaggagttcagcccgaatggatcatgggctgggacgtttcaagctcccctatcccgcccggctttattccgctgccgaaaacatataaagttccgctcgttgggcgcattgcctgcggtacgccgatcacggccgaagaaaacctcgaaggctatgtagatgtacccgttgaccgtcaagtagatttcgcgctgctgtgtgagggtgacagcatggttgatgccggcattaaaaacggcgatgccgtgtatatccgtaagcagcctaccgtagaaaatgggcagattgccgccgtacgcattaacggagaagcgaccctgaagcgcgtatatatcaacggcaatacaatggtgctccaacctgcaaacgcaagctatcccccgctcacctattcactctccgacttagaagacgtagctattgaggggctcgccgtcggttttacgcattggttttaatcaaaaatgaataagagaggtatattttatgggtttacttgatatttttcgcgctggtaaaatccggcaggaaaacgaagcattaaagttgcagaataatttcttgatacagaaaaatgcttttctggataagaaactgcatgatctcggctgcgaaacctatgaacaggtgcagcagaagtgcgtagaagtgcaaaagcagatcggtcagcatgaaatcgagctggataatcttgcaaagcgctatgaaacagcaaatgcggatttagccgagaccacgaattctctctccaaaacggaaaagcaactccagagtgcaaatcagcgcctgcgcaaaagcaaggaactttacaaagccgtaacgtcctgtgttgaaaacttcacgacatttgacatttctccgtataactgcaaaatcccggacgtgaatttaaaagaagctgatgagctcgccccgtcggtcattctcaagctgcacagcatggacgtgcagtccctgcgcaaagcctaccgagagaacgaccgtcaaattgaaagcgtcatgcagcgatacgcacaacgctacaccacaaaggcaaaccaagctatttataagctgatgaccattgcgcttcgtgctgaattgcagaacattctgactgatttgaaatacgaaaagctggataaagcgctcgagaacgtgcggtcaatgacggctaagtatttgcaaattgcgtcagacggtaatcaatccattgccggaacgctcacaaagtttatcggtgaattggaatacctcttttgcaatgctgtaaaaatcgagtataactactacgtcaagaaagaacaggcacgccaggagcaacttgctttgcgcgaacagatgcggcaggaagccgaggagcgtaaggctctcgaagtggaaaagaagaaagtcgaagctgaagaaaagaagtatcagaacgagattgaaaagctctttgcgcaggctgaaaccgcgaacgatgttgaaaaagagaaactacaggcgcgcattttggagttgcaggcacagctttccgatgtcgccgtgcagaaagaaagaattgcttctctcgcaaacggccgcgccggcaatgtgtatattatcagtaacctcggttcgtttggtgagaacatgtttaaaatcggcatgacacgccgccttgaaccgcaagatcgtatcgatgagttgggcagcgcaagcgtaccgtttaaatttgacgtgcatagctttatcttctcgaacgatgccgtcggtctcgaagcaaagttgcatgagatgctcaatagcaagcgcgtgaacaaagtcaaccgccgcaaagagttcttctatacttccatcgatgagctcgaaaaattggtgcaggagattgagcccactgccgaattcaaccgcaccatgatcgccgaagaataccgtcagtcccagtcttccgacgttatctataccgatgatgttacggacgatgacgaggacgaagaagaataagtacgaaaggaagcgccaaacatgaaattcggcattcggaagcccaattacaaagcacggttcaaagcgcgcactaccggcaagctgaaaaggaaaatgaaaaaagcggtcaatcctttctacggcaaaaagggcgttggatttatcaaaagcccctcaaaatcggtccaaagcgcgatatatcacagaaccaccgtgggcgtaccctctgttctcccgaaatcgaagtcccacaagacttcgcctgcaagtaagtcaccgtcgccaaaaccgacaagggtctcgcaaagccctcaagccgttcctgtgtattctgcaaaaacctataagactaccggcacggttttgtacatagtcggtatcatcgctttgctgcttggtctcgttaccattgctgttggcggcgcatttttcatcgttttgggcattgtttgcatcgtaatcggtcaccgttataaaaaacaagcacccgatacgaataacaccgagccacctcaaacataaaataagtcaccttttcatgcagaaggtgtggatagaaataacacactgaccgaagtcatacagaactccgacggtcgccctctcccgagggcgtggataaaaaagaaaaagccccgctgtggggtaaaaagttgaaaaatggaaacccaacatgttataataatcatagagaaggagttgattttatgccgacaatttcaatgttcagaggaatcaaggtctgtatttattggagcgaccacatgccgccgcatttccacgcattttacggcggcgctgaggttctcgtatccatcgaagaattggaagtgttagagggctcaatgccttctaagcaactgaaaatgcttctgggctgggcagctttccatcaagaggagctccgcgagaactgggagcttgcaagaaatcagcaggagttgttctccatcgagccgctgagataaggaggttataccatggcaaacacagttgaatattatctttccaaaggatttgaccgcaaagccgcagaatactttgcaggcggaaagaaaaagatcgtcggtgtcgttgccaatcgtgacttcaccctgacgatcagattcgataacggcgaaaaacggctttacgatatgcgcccgcttctcaaaaaaggtaccgtttttgagccgttcaccgatatggaaaatttcagccgggtctatgtagatgatacccacagcatcgcgtgggatattgacccgaatgtggacagcaataaggtctggaacaataaagttgatctttgcgcagatgagtgttatatcgacagcgtgccgatgaattgaagcccgccacaaaacaaaaaaaagccccgccggtgctaccaacaccgacgaggccgcccggcgaaccgggtggacagtatagtcccgaacaaactatattgtaccacctgacccgggcaaaagcaatagcccgggcatttttatgcccaattttaaacgcatataattgagaacggataaaaacaggaggtacataaacaatgagatacgcgatatatctgcgcaaaagccgtgcggatgatacgtccgagccgctggaggtgaccttgcagcgccaccgccagatgctcgaaaaatatatgcagcagcacgacatcgccgtgcaggacgaagacgtttttgaagaagtcgtctccggcgacagcctttacgcgcgtccgcaaatgctgcgtctgctcgaggccgtcgaagcgggcacatacaccggcgttctgtgcgtggatatacagcgcctcgggcgcggttccatgcaggaccagggcatgatcttagacgcattcaaatggtctgacacgaagattatcacccccacgcgcacctatgacctctcgaacgatatggacgagacctacaccgaattcgagagctttatggggcggcaggagtacaagatgatcaaaaagcgcctgcgccgcggattgaacgcgacgattgaaaacggcggctatatcgcgaacgcaccgtatggctacgataaaaccaaaatcggcaaaacgccctcactgaagatcaatgaagacgaagcgaagtttatccacatgatcttcgacctctaccagggcggcatgggagcattgacgattgcaacgacgattgatcgacttggagcaaagccgcgccgcggcgagcattttgcgcgctccacaatactcaagatactcaaaaacgacgtataccgcgggaagatcgtctggaaccgaaagacgtgcgtgcgccccggacagcgcggaaacgagcatcacctcacgatctacaacgctcctgaaaagtggactgttgttgacgggctgcacccggcgattatcgataacgaacagtttgaagccgtacagcggatccttgcagggcactatcacccacccgcaaacaccggcaagcgcataaaccccttagccggtctcgtactttgtggaaactgcgggcggcctttgcagcgcattgcaatccagtccgccggcggtcccctactcggctgccaagtgcccgggtgcatcgtgtccagcaagctcgaatacgtcgagcaagccgttctgcgggaaatccaaaaggagtttgataagctctgcgccaacgcggagcagaagcagcaggaaagccaaattgactacgcagccatggcgaagtccatagatgccgagatcagtacggcacatcagcagctcggccgcctgtacgatctggtggaacagggcgtgtacaccatcgaggtgttcaacgagcgacgcggcgccttgctcagccgcatatcggcgctggaagatgaacgtaagaaccttgtcccgccccaacagctcgacctcgaaaaaatgcgtgccaacattgaagccgtgttcgacgcctaccccaccgccgacttcaacacgaagaaccaactactgaaatccatcatcgataagatcgtatataacaagcaaaaaggcgttcaaccaaaagggttcaccctcgaggtttttttacattgcctgtacttatagcttgcacaatgttatgataaagactgcttagaggatttacgtgtgctgtttcccgcctcggtgcagcccgttgtggacgcttccgctaatgtgcgggtgcgggacgttgatgtaatctctgtgtacattgatatgcagccgatcccctttaaccgcggatattattccattgatctcacgtttttctttgacgtatctttggagctgtacggtggcgcgacagtgggctgcgaacgcgtgagcggtatttcaattttcaataagaaggtcattctctacggcagcgagggcaacgtgaagatgtttacaagcgagagctgccgtgacgaagccgatttacagggcaataaggtcttacccaaggcgactgtgcaggtcgcgcagccggtggcgctttccgcgaagctttgcgagcactgccgctgcggctgcgagccctgctgcgtgatcccggactgcattgcaagccgttacggcggcgcgtttgaaacggtagagcagaaaaacaccgtatacgtgacgatcggcctgtttaccatcgtgcagattgtgcggaatgtgcagatgctcattcccgcgtttgatttctgcattccggataaggaatgcgtcacctccggcgacaacccctgcgagctgttccgcaagattgatttcccgaccgacgaatttttcccgccgaaagcgagcgactgcggctgtggctgcggcagacaaaattagaaccgcatttgaataatataagccgtgcactttgaaaacaggtgcacggcttactctttttatacttttgtcagtcttgcgaagtttgcaaacagctttttggtgccgactttgtcaaacgcgacttcgagcagcgtatcgttcgccatcagcgtggcggaaacgatgagccccgtgccgaacgccttgtgcaggacagtatcgcctacgcggtatgtaccggcaggcgcgggctttacgcgcggcttcggcatgaatccgccggcttccgcaacggattttgttttcggtgcttccccgaacggcttcgcgccgccgaagctcggcatagagaccgggcgcgcgctgtaatcgcgggagcgggtgtgctcgatgagcgtctccgggatttcttccacaaagcgcgaaacgcggttgcggttcgtcatgccgaagatcatgcgggattccgcgtggaaaatgtacagctcctcttttgcacgcgtgatggcaacatacgctaaacggcgttcctcctccacttcggacggtacatatacgctcgccatgcccgggaaaatgttttcctccatgcccggcaggaacaccaccgggaattcgagaccttttgcggagtgcaccgtcatgagcacgacggaatcggcgttattatcgtaattatcgatgtccgtgatgagcgaaacttcttcgagaaaatccgaaagcgtgccttcggggttttcctcctcaaaacggcgcaggttggaagcaagctcctgcacgttcgcagcgcggtcttctgcggattccgggtcgtcggtcttaagaaaattcaggtaatcgatgcgctccacaagctcgtcataaagctcgccgagcgtgacttcttcgtcgttgttgagctcgatgagtccctgcatctgtgcggcgaaaagcgtcattttatttgcggcacgggacagtgcgggatagtctttcgcgtgcgagacgacctcaaacagtgtttcacccgtctgctgaccgatctgtgccgcgacttcgaccgagcggtcgccaatgctgcgcttcggcgtgttgatgatgcggcgcaggcgcatttcatcactcggattgttgataacgctcaaatatgcgatcatctcgcggatctcacggcgctcgtagaaacgcgtgccgcctataattctatgcggtacgccggactttgcaaaattgcgttcaaatgtcagcgactgtgagttcatgcggtacaaaacagcgtaatcagagaatttccgccccgcagcaacgccgtctaagatgatcttcgtgatgcgctcggcttcgtccgtttcattttccgccgtgtgcaggtggatcatggcgccggtgccattctgcgtccacagcgttttgccttttcgctcggtgttatgctcaatgacggcgtttgcggcgtccagaatattctgtgtcgagcgataattctgctccaaacgaatgaccgtcgcattctgaaacgtattttcaaagctcagaatgttttcgatcgtcgcaccgcggaatttgtagatgctctggtcgtcgtcgccgaccacgcagaggttaccgcttttttcggccagcatgcgcacaaatgtgtactgcgcatggtttgtgtcctgatactcgtcaaccattaggtagcggaaacggttctggtagtattccagaacgtccgggcactttttgaagagctccactactttgttgatgaggtcgtcaaagtccatagcatcggcgtcttccaaacgcttttggtatgttgtatacgcgcgggagataatctttaatctgaaatcgtcgccgaccgtgagggcgtactcggcaggcgagattaaagaatcctttgcccgggaaatctcgttcaaaatcgattttggcgtgatgtttttttccgaaatatcgagctcttttaagatgcttttcatcaagcggcgctggtcgtcggtatcgtacaccgtaaagtgcgaggaatacccgatgcgctcgccgtcacggcgcaaaatacgcgcgcaggtggagtggaacgtcgatgcccaaatgtcgttggcggcctcgcccaacatggcacacaggcggtctttcagctcgcctgcagccttatttgtaaaggtaatagccatgatgcgccacggcgcgcaggcagaaacactcaaatgctcctgtgtttccgttgtgagcggcgtgctgttttcaatataagctttgcacacggcaatatcattttcatcgagatcgtcacgcagataggtgctgttgtacgcgtcgccgtagcgcaggatattcgcgatgcggttgatgagcaccgttgtttttccgctgcctgcgcctgccaaaatgagcagcgggccgtttacggtgaacacggcctgcttttggcggtcattcatgcgtgcaaagtctttttccagcactgcgcggcgcagtgcaaggattttcgatttatccatatattcaaatgatctccgttctgttggttctgtgtcttctcgtttttcggtttctattttactatatcttgcgaaaaagttcaatcgaacatagaaaattcccgtggcgagctttaaaccagccccgggaggtttatgtgtaagtcaatataactttacaaaacaactcaactttacaaagtcgatacgctttacattatgcaagcatcttacgcaccatgtcgtaaagcacgggcttcatattgtctattgtatccggcttattttcaatcatcgtggcaaagcaagtggaaccgatgagctcaaccaccaaaaacacgcgcttatataagacatcttctgtgcagcccacggcgagcgagctgctctcaatggcagtgacaagcttgtcccacaacgggtcttctcttagatcaagctgcttttcaatcatcggccaggagaaattgcgctccaaaagccgcagtgtcagacggcttcttttaaagtattccacgatgtaatcgaccatgaggatgatgtcttctacaaaaacgccggtcttatgctcttccgcatattcataggcctcactcaaaacacgcgcggaaatgcggtatgtgagctgctgcagaagctgggttttatcgtgaaaatacagataaaacgtaccctttgcgacgttcgctttctttacgatctcatcgaccgaggtcttgttaacgcccttttcaaggaaaagctgataggccgcctcaagcagcccctcctttttctgttcttttttctgttcaacaccgccgcgcatggctgtggcctcccaacattcaaatctacctgtgtaatcacttcatttatcttatagtataaggcggatacaccgtaaaaagcaagccaaaaacaacattttgtacagatttgaataaaatgactaatagtcaatttattttgcctacacagttcgtcacttttaatattgactattagtcatttttggactaaactacataacgaaataaacgggatggttcccgaatgaaaggagcggtgctaaatggagcactttgcacgatggatcgtgaagcgcagaaagctgattcttgttttagcggttctgcttttgatcccctcggtgttcggtgcgctcggcacctacattaactacgatattttgacctatctgccgaaagatctggattccatgatcggcgagacgtatttggaggatgacttcaatatggcatcggtttccatgattacggttgaaaacatgtctacgcctgataccttaaaactgaaaagcgatcttgaaggggtcgaaggcgtacagaaggtcatgtggacgagcgattttatcgatgtgacgacgccgaaggaaatgcttccgagcgatattcagaagttcttctataacgattccggcgcaacgatgctcatcgttcagttcgatgccccgagcgcagatgccagaacgatgaacgcgcagaagcaaatcaagaacatcttgaataaagattgcttcatcggtggtatgtcggctattttggaagataccaagagcctcatcaataaagaaatgcccttgtatatcctttgcgctgtgggcgcttcgttgctgattctgttcctcagcctgaaagaaacgattgtgccgcttatcttcatgctcggcatgctgttcccaatcgtctataacttcggcacgaacattttcctcggccaaatcagctacattacggaagcattggcaacggtcctgcagctcggtgttacgatggacttctccatcttcctgctgcaccgttacgaagaagaaaagctgacggcggcatctgatgaggacgccatggtggcggctattaaaaagacgttttcctccattaccggcagctcccttacaacgattgcgggcttccttgccatgtgcaccatgcagcttacgctcggcgaagacatcggcatcgtcatggcaaagggtgttctgctcggcgttatctgcaccatcacggttttaccgtcccttatcatgacgttccgtcgtgccattgaaaagcacacgcaccgcacgttcatcccgaagctcaagcgtacctcgaacttcgtcgtgaagcaccgtgtgccgattttgattgcgtttatcataatcttcattccgttcttcattgcacaatcaaagacttccgtttactacacgatctttgatgcgcttccgcaggaccttcccggcattgcgggtacgaaccgcttgaaggaagacttcgatatgacaacgtcccacttcatcattgtggacgataccctttccgaaaaaaatctctccgatctttccgatgagttgagcgacgtggacggcattcaccaggttttgagctatgaaaagttcgtcggcggcgcgatcccggaaatgtttattcctgacgacgtgcgcgacatcttcgaggccggcggccacaagatgatccttgcaaactcctcttataagagcggcagtgacgagcaaaataaccagctctctgaaatgatcgatattgtgaaaaagtacgacccgaacggcgtcatcaccggcgaaggcgcgatgacgaaagatttgatcgaggttgcggatgtcgacttcaataacgtcaacatcacaagtatcatcgtcgtgttcgtcattatcgccatcgtgttccgctccgcttctgttccggtgctgctcgttgcggcgattgaaagcgccatcatgatcaaccttggcattccgtacttcaccggcacgacgctgccgtttatcacaagcatcgttatcggcaccattcagcttggtgcaacggtcgactatgcgatcctcatgaccacgcgtttccgcgaagagcgtaacgcgggtcacactgcaaaggaagcggctcaaattgccgttgaacagtgcagtcagagtattttaacaagcggactcacctttttcgcggcaacgttcagcgtgtccctcgtctcccgtatggagctcatcggcgtgttgtgcaagctcatcagccgcggcgcactcatcagtatggcagttatcctgcttgtgttgccggcactgctcgtcatcacggagccaatcctcagaaagaccacgttccattggctgaaaaagcccgaaatcaccgagaaaaaggcataatcgattcagagaaaggatctcgatcaatatgagtaagtatcttacaaaatctgttgcggctacgatttccgcacttctcctcctcggctgcgctgccccggccttcgcggcggatgctaccgttgagaaaaaagaaacctcttatctcatcctgaacgcagacggttccgtgcaggagcagatcaccagcgattggctgcacagcgatgacggttttgatgccgttaccgacgaaagcgacctttccgatatccagaacctcaagagcgacgtgatgccggaacagtccggcaatacgctcaagtggacgacggacgaaaccgatatttattatcagggcaagaacagcgcacaggcgccggtcggcgtttccatcgagtatacgctcgacggcaaggcggttacggccgatgaactcaagggtcagagcggccaccttgtcgcaaccgttaagctgacgaacaacaccggcgaagaagtgaccgtaaacggtaaaaagcgcaccgtctataccccgttcttcaccgttgcggcggctgtgctgccgagcgaaaacttcaagaacatcacgacagagcacggtcttgtggagtctgattccaaaacgcaggttgcctgctaccttgcgatgccgggcatgaaggaagccgtcagcgacctgctccccgacagctttgataagctcgacgacctgatgctcgatacccttaccctcgaagcggatgttacggactgcaccgtcccgacgtttctcttcgccgcggctccgaacctttccgacctcgacctcgatgaggcttccgacgagcttggcgacacgatggatgagttgaccgatgcaatcgatcagctgaaggatggttccggcgcactggatgacgctgtgggcacacttgtcgaaagccttgacacgtttgcttcgagttacagccggttcgatgccggcgtggacagcgctttgaacggcacacagacccttgcaaacggcacggaaaacctgcttgaaaacgcacagctcttggcaacgaagaccggcgagctttccctcggcgctattcagctgcagaacagtaccgcacagcttgcgggcgtgatgaaccagcagcttgtcccgggtcttgtagaggcttccgaaaagaagaccgcgcttgaagacaaaatgaccgagctttccggcaagctggagaccgttgaaatcccggatatgacagcactcaaagcacagctcggcgcaggcgctgaacaggttttcgatggcgcggcgagcggcgcagcgaaagcggcttccgaagctgctgcaagcaatgcagcgaaagcggcttcccagaagacggcggaagagatcaagggcaacgtgcaggcggcttcttcctctgaagatgtcacaaatgcagccgcagcccttacggcacagctttatcaggacggttattccgcaggttatcaggcttcaaaaacttgtgtggagatggctttaaatgaacttggcctcgatgacgcgcagaaaaaggctattttaaatgctcttgcagcacagccttctacctctaccccgagcgccgaagtcatcagtaacggaaccgcgcaggtttctggcatggttgagaagattgcttccgacatcgatcccaacgccatcgcatcggccgttggcccgaaggttgctgaacaggttgccccgattgttacagaagaagtaacgtcttccgatgaccttgcggcggcaaagcagagcgctgtgcagcaggttgcagcggcaatcccggacattaacaccgatgagctcaagagtttgatgggtgaattcaaagacctctcctcgcaggcaggcgaaatgatggacagtgttgatacgctgaccggcgcgctgtataacacagagaatccggcagataccgacacggttgtcggtgcggccaacgcgatttccgacggtgctgcaaagcttggcagcggtgcttctcagcttgcaaccggcacctctgcatttgcaaccggcgtaggcacgctcgatgcaggcaccaaccaactgctcggcggcatggagacgctctcttcctccagcaaaaccgtatcgaatgcgatcggtcagttccagaccggcggtgcagaacttaaagacggcacgtccgagctcagtgacggcatgacggagttctccgatacaatcaatgataagctcgacgacctcggcgaaattaccgacccggattccacgctggcacgcgtgattgacatcatgaaggatcgtgcggacagcttcaagggctccggccgcgcagacggtacggatatgaccgtaagctacgtaatgcgcaccgcaacagactcgagcagcaacagcacgagcaccacggaagaaaccacgaccgagactgaaaccaaagacagcttctggaaccgtgtggcaaacctcttctctaagtaatttaaaataaagcaaaggaagcaggaacacatcgaaaggtgctcctgcttccttttttattgcttttttcgatgaaacggtgtatgattatcgtgtttaaattagcagaaaatggggttgaaaaatgaaaaaactatgcacgctgttcctcacatttttgaagatcggcgctttcacgttcggcggcggctatgcgatggttgccttgttggaaaatgaatttatcgcaaagaaaaagtggatcgataaaaaagagttcctcaacatgatcgcgattgcggagtctacgccgggcccgatagcgattaacagcgcaacgtatatcggttatcacattgccggtgtgcccggcgcggcgacggccacgcttggggtgtgtatcccttcgtttgtcatcatctaccttatttccctattctttgaccagtttttgagcttggaattcgtttcctacgcgttccacggaattcaggtgtgcgttgtgtacctcatcttttccgccggtgtgcgcatgctgaaaagtcttgaaaagacggtgctcaataccgtgcttgtcacaggcgtagcggtttgcatgatagcgttttccgttttcgctgtttcgttttcgtccatctactttattttgcttagcggtgtggttggtcttgcggcctacttcatacagcgcctgcgtggaaaaggcggtgacgtgaaatgatctattttaaattattcctgaccttccttgagattggcgcagtgtcgttcggtggcggctacggcatgatctccatcatccgcgaagccgtgctctcgaatcactggctcacggaaagcgagttcatcaacttcattgcggtgtccgaatcgacccccggcccgcttgccgtcaacatggcgacgttcatcggatcttcgcaaggcggcgtgttgggcagtctgctcgcgactttgggcgtggtgctcccctcgttcgtcattattttgctcattgcggcagtgttgagtaatctgctgaaatacgccggtgtacaggcattcctctccggcgtgcgtccgtgcgtagtggcgctcattttggctacggcgctgacgatgggccttagcacgctattcagctttacgaccatacgaagcgtccccgaggtcgatctgcgcggtgttgtgattttgctgctgctgattactttgcactttggctataagcactttaaaaagaaagcaccctcgcccattttgatgatcgtgctttccgccggtctcggcattttgttctacgcattttaaattttgggaaaagaaaagacctctgctcggggcaaacagtcttgagcggaggtcttttctttatagaaaatagcgtttagccgttatttcggctgcacttttcggcgtcgatcgcaagcacgatcatcaaaacgcacagcgcgtctgcggggtcgtatatgttcaaaaggtacgtgtccgtccagttgaacagctctttggagatgcttgccacatcgtgaccgcttccggaaacaacggtataatcccactccaaaacgttgccctccacatgccagccgttgcattctacgttgtatttcggcttaaaaagtgcaaattcgcggctgatacaaccgacatattggtttttaaaatacatctcgaatttcggcatgaacgtgaagatgcgttcttttaccgtgccgacctcttcgccgtaagcgtcaaaaattttcaggcagtgtccccaggagaactgccctttgacgacatacaccgtgttgccgttctcatcgtaaatctcgtagctgtcgaaccatgaaaaaaagcgctgtttaaaccgtaaaatcataaaaaaacccctacttcttgccactgttttcaatcgtatagatcacacagacgaaccctgcgatgaccgcgagcagtatggagccgcttaacccgtcgttcatggcagcgccgaggaatagcccgactatggcggccaagatgattacaacggcggaaccgattgttttcatgttcacgacaaaatctcctccacgtacttctttaagccgattgtaccacgctgcgtgtcggttggcaatagacttctgcaaaagtaaaagaaaagaatacgttaaaagcaggttaaaaacatgaaaaatatccacattttttcgaattttctattgacatttcctttgcggttttatataattcacttgtaaatctgtcaagcgccccgcggtcacccatccttcggcccggggtgctatttttctgaaaataaaaaaggcgcagagctcgctcggaaattccggcagccctgcgccttttgcagctcggtctttcttgcttcttccgcctcgtcaaacttcgccgctttcgctttcagcgcttcgtagcacggacataaagcagaaagtatttgaaaaacatcgtttattgatacattagccctagcattttgactttatctcttccgtctgtgggcatttttaaatcgcccatgaggcaggcgtaagagatggcacttttgccaaagcgaccacgaatctcctccacagcatcctgtactttctccattgccatgcggtgctggacattatcaaacagcgtgagctgctcgacgctgtctttgggcgagagttcaatggaacggacggtgaccgctctgactttcgtgttccaagaataccgctctttaaaactccgaaatgcggcagcggcgatctccgagggaagctgtgtcttgagcggtagcttacattgatactgtgagccgaacaggttattgtcccggacatggacttggacggtagattgctaccaaacagaatttgtgaatgcaaacctcaaagcagtttgcttcctgcacgctttctatcctgcggcctgtgtcagcacacatgccgttgtgctctgcgacatgaacggcagacaaacgccgctctcacctgcgccgaccagcagctccgtgccgctcgggctgatcaggagaggatacttctcacacagatacaccgggccgtccgtgacaccgtagctgttaccgcccacaagcgacaagctgagcgtcacatagctcggcccgtccggaatcgtttgaatcgcccagaagccgctccacatctcctcaatgtcgtcgctgtcttcgtatgaccactccagatcgactgtaccccccgtctcatcctcgagatagaagcgcagcgagaaataggcatagcggccggtttcctctaccatggtttctgtgatccagcccgtacctgtactctgcgatccggcaagtccaagcgcggtcatgcctgtccagccgtcagaaagccaaccggcaaattcggatgggacgtcataccaggcatattccgtaaaatcgaacgaaagataatcactggcttccgatgtacacggtgcaagatggctcatcgcatcaagcgagggataccattcgcaggtgttcccgttgttgtcggtgataaagacctgggtgtcggcctcatgcgcaatgccgtcaagattcgcaaagagcagcaccggttcgccgctctctgaccggtagagaacctctgtgacctcatcggtctgtgttttttcgttccactgcacacggttgattgcaaccgtcgcgttctcgtcgaccggcacaatgcagtacagatgccccgcgctgccgatgatgtgctcatcgttgatctctgcgataaaggggtattcgaggagcattgcctcattggtttcctgcagccacgcagggaaagccgcctcgaaactctcatcaaacagaccgccgacatagccgagatacgccgcgccaaacattgtcgtcggaaaatcaatcctgtcgcgcaaccatccaagcgatgtctctgcctcctgtgaaaacgcgtattgcaccggcggtgtgtccacggtcttatcctgtgatacaaaatcgttcccgtcgctctgtaatacagcttcctcctgttggctttccggagtttttttgtgggcagtatttatttttggttcgtcaggctccgtttgcgtcttctgcgtacaggcgcaaagcgacagtaacagaaccagtgccagcaatagcgcgaacatgcgtctgggtgttgttttcatagccactcctttcagaattttccgcttcggccggaaccgcctccgccggattcgctgtggctgctcccgccgccggaagagctgcgctcaatcttccggctggaggtcgtcttatgggtaaaatgatctgtttgctctgtaagctgaagtcccgcggaaacataggcgttagcggttgctttttttgatacattttccattttctgccatatcacagcgacgatcacggctgctgccagtagggaaagaccgatcacgataaggatcggaaaaaacaaactcgctcgaaccggctttcctgaggctgctttctccagatagacgctgcattctttgatgtaatcctcaaagccgccgtaccagtcgttttcaccgaagttatcgaggaataccttttccagtttctgctgaccatagctgttgaacgcatactcgcagtgtgggccatagcagaacatcgcccagtcgcgatcatccatgctgagcagaagcatgatcccgtcgcggtccggcccttcacccatcgtgtattcgtgatagatggtataggttgccttatagacaccttcagaatggaagtcacgataatcctccacggttacgatatatacaccgatgccgtatttttgggagacggtttccgccatcttttccagcatcatattttcgttttcgctgagaagtccggcctcatccgtcacataataaagctgtgcacctgtctgctcggttgcggatacattcacgcagaatacaagcgcgattataaacgtcagcaggagacagcgtattctctctttcatttttccgccctccctagtgtgccaaaagcagcagcgcagtcacgccgatggcgctgagtgacgccgcgattgctgcaaacaaaccgacaacccgcttcgtgctgacaggaaggttgcctaccaacttacctgtctgaccattcatggcaaaaaggaaatcttttccttcccactttgtattcaagatccagacgggaagcaacgcgtaatgcactttgccgcgcttcaaacagatgtctcggctcgtttcattgcaggtggtgtaattcgaaaccgtgctttccagcgcagacaccagcgaacccgcgcagcgcttgtctgcccgctcccggctgttttcaacgctcacatcatatttgtctgccagaaatccgggcagatatgccgtggaaaacggctttaagtctgtatagtcatacggttcgatggaatccatgtagtcgtccggcattttgcttgacgcgtccaccgggattttctcaaagccaatagaaccggcgcggcgcacatcgtagtggcttgtctccgtgatttcataatctcccgaggtgtacttatgtacagtggtagcatggaactgcacgcttccgctggccgcaccgtcatacatccagaagggtacatacacgcctttgacctcctcaagatggttggacttggagaacgttgacggcaacagcggctttttgcgatagtgtttcttcagcgccttgatggcatcctccttgctcagcttaaagggaagcacaaaatcaggtttcaaaacgccggcgaactgacccggaagcaccgacggatttccgcagtatgggcaggacgtagccgcagtcgtcgcgtcgcagagcagctccgcaccgcacgacgggcagctgtaagccttcatgtcagccgcgtccgcgccccagtcctcgttcaggccggaagtgtcccagtcagagccgcctgcggcggccggttggtctttcgcttcggcagatttttgagccgcttctgtttcttcctgcttctgcgccgcttccgctgcttttgtttctttttccgcgtagagcgcttcaatttctgcgacatcgaagcttgagccgcagtaatcgcactccagcctgccggattctcctacaaaatggagtggtcccgtacaggcgggacattgataatttgtgatttgtgttgccatctaagttcctcacttcccagttggtgttacagcccgcaagcgcagtccgtagtgccgaacacagttataaccgcattttccggatatgtcccgcaaactcactgtttgtgataaattgcatccgtgtcctttatgacgttttctttcgaatcgtacaagatgcgcatgtcagccgctgtacggtcactgttgacaagtataatggtaatcagcttttcggccttttctgcaatttcgtcgtaaacgcagtctgcatcgcaaccaaagtcaaagctctttgtccggaacgcggactcggcaaaaatgctccagctgtaccattcttgtgtctcgttgttccaccacatagtacaacagttcataccgcttttgtcctcatttgcgacaaactcatatttttgcaggccgtcctccgtaacccacgtgccttccagcaatgcaaagacctcctgtgcttccttttggctttcggcttttctgtcggcttccgcttgcagctcggccgcactgtaatacgcttcgcggtctcccgtttcgctccagccttcatcgtaccaaaacacgtctgccagccatgcaaactgcggggagtccagataacgcagacgatagatgatatcgtgcgccctgtcctcgattgtcagcccgctgatcttttcggcaaaatccgcctgaacggtcagaacaccgtttcggaacgtatggtcaaactgatcgcccaaatcttcaaaattcgcgtcgtagcagcggatgggattgtctttgaactgtacgccgcgataatagagcctcatcgtcccttggctgtaaatggtttttgtaatatggaaatcgtcaaaaaggaccgatgtttccgggtacggataggtgcattcgtcgacctgaccgcaggaggtcagaccgagcaagctcatacccagacctgctgcgatgaggagcgctttgaacttcaccgcatcacccccgttttttcgcgaataaccggattctcccgctccaaattggagcgggagccgttttttattggaacgtcatattgttgagaatgatatccggcatcgttcccggtacacagtccatatcccgaaggccgatggaaagggcacggccgtcgtcaagctgcgcgatatactggatccaatcatagccgattcttttgtaggtgcggccatggaaggtaattccgccaatcacgcggtcctcgatatccttgtagttttcgaagctgtccttgtaggaatcaaatttttcaacgttctccctcacctcaaactggatggcgcccgcaccaaacgctgtggggtcgtcgttttccaccaggcagcgcccactatcatcgaacgaccagccggatactgggatcttcgtcatgatcttgaccttaacatcgtcttttgcaaactgggcgatttccacggagaagtccttcatctcggcgtttgcggatgctgccttgttcgcctcggcggcctcggccttcacgatgtccagatacctttctatggcttctgtgccggagaagccgctggtgttgtacgcactcaccgtataaacgcccggagtcttttcacagaagttaacgtagatgaaatgcgagctgtcttcgctcgaaatccatttgtagtagcggtagtttgccttcatgtggtcgctgtactcttccttgacaaacttgccttctacgccgaagtaggcaacgatatcctcataagtagcatcaaaaatattattattgacctcgttcatccaaacgtagcccttttgcacctgctcctcggtcacgatgccgtttccgccgggagctgccgcattcgtctggttggtcggagcattcccctccgaaacaccttctccgatggcatccggcatagacttgcctgcgtcaatcagaggcagataccagtcggtataccggtagggatacgcatcttcctccatgtctttccaataaaggccccacgggcgcagataaatgtcatagtggaattcgtcatcgccgtcttcatagtcgccgctgatacagatcatatcatcgtagtccaaaagaccggggtcaacgatccaatcggcatgctccagtgttacgtttgtaaaccagccaccctcggacatcaccgtaccgtgctcgccggttccggcttcactcagactgacctgcgcggaagccataggtttggatctcgtgtagtcctcatcccaaagctcgattgtgcctgtgtagtctgtgtctaaatcaatgacgccgcagacatcccaccagtcgccttccatgctttcataatcgccgtagcaaccgctcatcttccaccagccgtaccattcgccgttccaccaatcgagcaatgtgtctccggtcgtattggtggtttccggttccgtatgggagaccgtttcccggctaagcgtagccgggtcaacggtgattgtaccttttttgctgccgagaaattcctcaaaggtcgctttgacttcactggtcgtgtcttttagcacgaaggccgtccgtacttccagcgttgcacccggcgcaacatccgtaaactgatcgctcactacggtttcaaggttctcatagtccgtgataatagatgcagcttccagctctacaccgttttgcataaccgtctcatcgacactccagagatatgaggcgttttccttgctgttgtttgtgaagtccagtgtcagaacgattgcgtcgtttccgtccgaatcttccatgatgcatgcgcccttgtagagcagctcatagtcaccgagcttgattaaattggagtctttcccctccttatcctttccgcaggcggtgaggccgctgagcagcatcagtgccgtaagaatcaggcatagaagcttggtcttcatctgtttcataatttcctcccaatatcctttagggttgcacaaatctgccgatcagcagaaaacaacgtatactcccggcaaaaaacagccgtgcctacctgagacattttttcttatttcttttcgcgccggataaggtttccgtccttgtcggtaaacttaccgcagagaatcttgataaagtcgacaaggtatccgatgccgaacagacctgccgtcagcgtgtagagaatgccggtgccaatcttaccgacatagtagcggtggacaccaagaccgccaaggaagaagcaaagcaggaacgttgtcatccagtccttcgtttcgaccggaacctccggcgcaacatagtcctctactgcctcaccgttcaaaatcttcttcacggtttccgttacggtgtcaatataggcgccacgctccgttgcaagaccgaccgtcgcaccctttaggcccttgcgcagtgcgctgttcttatcaacgcgcataccgccaaccgacatcttggcctccgtaatgaccggctgaatccgaatgtgtgtgccatccttgaggtaaagccagaggccaacgtccacatttggttctttctcaaacgagatgcgctgtccgggaacgccgcctttgatctggaatggcatctggaacgctgctctgcacgcattgagtttctgcatgatttcttccagtgtggtagaataggaaagatcaaattcacggggactggtagcgaatgcaacgtctttcatgctgcctgtaaggttattcatcgttttttctcctttctaaaaggtcagaggcggatagtgttaatggcaagctgcacggctattttttcgtaaaggtgccgctgatgccgtagccggaattctcattcatggtaaggctgtttccatctacggagaatgtataagtagatggatcactccatgcctccagtgtcaccgtaagctgatcaccttcaatggtgtacgtaccgtcctgtttcatataagcattttccatggtgcatttgccgcttccgttgaatgtccatgtgatcgtaccgtctgcgccaagttcggcggaccatgttccggctaacgcatccttgctgccacaggcagaaagtgttaaaagcgtaaccacaatcagaagcaatgctacaaactttttcattattttgtccttctttctttaattatcatttgatggatatttatcctcttaccgcgccaccgcaatattcacaacagccgttcacgtctggtgtggtcgttgcgccgcagtagggacaggtgactgccgttttgggtgcggcctcctgttcaatctgctggcgcacatccttgcggacctgcgtcagaacctgccggatttcctcgccgagctttttgcaattgcggtactcaacgttagtttccggattgcatcgggtcgtcatccccggtcgcattgcgggaggcggtgtaatatctacggaatcggaattgatcttgaagcgtatttcgtcaaagtaatcgttgttgacgaatatggtgatgtagaaatcataggagtattcataccgcgggggattgtagctaatctccctaccctccttatcctcacgcttaagctccgtgcggctctcgtcaatgtcgagattacagccggtcacgtctgcaaaatccaaaacatccgggttggcttccacgagatttctggcacgtgtcaccatgaattttcccgcgtcctcatcaagaagcaccttggtgtccgcgccgagcgttctggttgtgtggaatgccgcgacctttttctggttttcttccctgtaatcaagctgtgccttgatttcctcaacagtgctgttgcgtcgatcagagaaccaaggggaaagcttttgggcgcagtttttacagagattgccgttttcaagcttgcggttgccaagtaaccctattttttctccgcaaatatcgcaatattttttatcaaacagtcccatatatgtatcaaactcctttgtgtatgctacttgaattatacggttactgcgtgtctgccttggaattgagtaccgcaccgtagatatacaaggccggaatagctattcctgtcaggatgcttacgacaataaactcgccgccgttgaccagactcatcacaatgctcaatacgctgaatacggccacaatcgcgccccacacgatgagctttcctgctttttcgctgcgcttactgtgcttaatgcctttgattccggcaatcatctggcaaattcctccgaccagcgtcaggaacagcgccgcccaatatggaaatgtcagaccggattccgcaccgagtcctgccgccaatacacccagtccaccgacaagaacacccgcaatgatggaaaatactgcggcaatgatcatcagaattccggtaaccttcaaaaatttatgccctttcatggtaaatcctcctgttacaataaatcgtatggtttgtttttattctttcgcagggtgtttggccccacattctgcacaaaatgtacgactgccgtttggcatacctcgcattactccgtttcaaggtttgacgtggcataagcttcttcggcaatacgcagcaccaaagtctccagcgcttctgcatggctgccgctgagcttttgaatctcgttcccgttatcggtgcgccaaatgacctggatttcgctgtcggtttcgtcctggacatttggagacggctttcggtacgcgggcagatccgactctgccagcatattctgaagttcaaaccattgcacccacgtaagctgccaagggattgggttggaaaacgcatccgtttcgctttctctcatctcgtcgccggattggtccggaaaccggccggtcagcagaggcatatccttctcccggtagaatttcagtgaaaagcagctgtaaaaattcctgtggttctgtcgccactcaaattccaccagatcttttcctgctctgtatgtatccgggttttccatcctacctccatcttgaatccggctatcgatataataccgatacagtgatacgcccgccagtgcgataaacacaaccgccgacacgatggtcagagcgattatggatgcttttttcacttcaaatccccgtcgtcaaacggatcgccacattccgggcagaacttgggcgggtgtgtcgggtcagccggctcccagccgcatttgtcgcatttgtactgcggaacaccggccggtttcggtttgccgcattcagcgcaaaactttcctttgttcaccgcaccgcagctacacgtccagccgtttgcctgcgattccggctttttggtgccgcattccgggcagaattttccggttgccgtcgcgccgcactgcgggcatttccagctttcggcagcaggctttggttccggctttttactgccacagttcgggcagaattttccggtaataccgctctgtccacacgaacagttccatccttcagcagctgccggagccggagcaggctgcgctgcttgctgctgtgcgcccatctgatagagattctgcgcgttcatgccgcccgcctgacctgccatgttcatgcccataaacgccattgcagggcctgcactctgattcgacgccgcagattgcatcgcggaagcctgtgcgccgacaagataggctgccgctctcgtcggatccataaacgccgcattacgctgcagctccttaatcatctgctcatcctcttcgctcgccttgaccgacgaaacgccaaaggaaacgatctcaagtccacgcaggtagcgccattttccggataaaacttcattcaatgcctcggccagttccattgtatgaccgggtagcgcggaatagcggattcccatgtcggaaatcttcgcaaacgcgggctgaagcgccgtcaaaagctcggttttcagctgaccgtccagacggtcgcgggtatagtcttcactgacgttgccgcatacgttcgtgtagaacagaatcgggtcactgattcggtaactgtactcgccgaagcaacgaatggcgatgtcaatgtcgatgcccgcgcgctggtcgacaacgcggaacggcaccggagagggcgtgccgtacttattgccaatgagctctttcgtgttaaaatagtagacacgctgatctttgggcggctcgccgccgaaagtaaagcgtttgccgatattcttgaacgtgtctaagatgctggttcccaactcaccggagaagatcgtcggctccgtcgagctgtcatagacaaactcacccggtacggcgcaaagctccgcaaccttgccctgatcaacaataatcatacactgtccgtccgccaccgcaacgacggaaccgttcgagatgatgttttcgcttccctttgtgttgctgctgcgtccggaaacgcgccgctgtcccttgaccgccataacgttttccggaattgattcacagtaaaaatactctttccattggtcggccattacgccgccggccgcacccaatgctgctttaatgagtcccattttctgtactccctttctttacttattatgcccacggatcttccgccgcgggaatacggatgccgctgagaatactggaatattcccagaggaaccattcgccggttgaagccttctgccgcaatttcatgggacgcggtgaatccgcgccggacgttttaagaaacacgcgcatatagcccggctctatatcctgaggtctggggtctgccagcacgttcagcgtgtatggcacgcacggctgatacccattttccggcgttgcgccttcaaaatatgcaagcggcagataggctttgtcgcgcagtcggtcgcgcagaaactgacagtcatacggtgtcatgggcttaggaccgcgcagaagattcatcgcggcagcgcctgcatctttattcctgtcaaacagcgccaatgcacacaaaaacagtgcgcagatatgttccggctgccgccctttagcggcaagaatttcaaattcctgcaaattttccggaattttctgaattacaacctgcaacataaccactcctttctaaagtatatcaatcacacctgtggaatatatcggtaatcccaatgtgtagatcaaattatcaatctgccaatctttcacgaactgtcgctccttggcggggcacgctgtacgatgagctaacctcttcactatccggaaagaatgtccgttaaacctgtctttttttctttctccaaacgagtagaaaaacgacgacagcaacaatcaaaagcgttggcacaagtgtgaatgcaagaatttttcccacggagaagctgcgttctgccgcctgcacattgttcttttcttgcttttgaggaacatctttaccgacagtgttctcaccaaatccgctcttttcgcccctatctccattctttccgtcgctatccgctgtccccgaaattgatgagccgggtgaagtcgtaggcgaaatacccggcgaggccgaggcagctgcattaggcgacgccgtgggcgaggctgtggcggatgtgtgtggtgaagccgtaggcgtaaccttcggcgtaggcgtaaccttcggcgtaggcgtaactttcggtgtaggcgtaaccttcggtgtaggcgtaaccttcggcgtggctgtggcggatgtgcgtggtggagccgtaggcgccgaagtcggtgttgtgctcggagccgctgtcgttcccggtttgagcttgggaattggatttgtacgtatcgtgccgcacatattgcatatccattgcataacgccctcttggcttgttgtcggttgtgcgaccactttcccggcgtcccaattgtgatccgtcttggcaatcggttttgtctccgttacactgcattgcgtacactcccgcttttggatgccggtctccatgcaggtaggctgcgtcgtggtgaaccacgcgccgaatttatgtcccgtcttggggatcccgcggctctccgtcgcaccgcaggttgcgcactcccgcttctgcatgccttcctccgtgcaggtggcctgcgtcgtggtaaaccacgcgccgaagctgtgccccttggcgggcgtcgtggtggtccccccatccgcgccgcagtcgtcgcagacaaattcggtatatcccggcgtggtgcatgtagcaaatactcgcttccagacgacccagaagtgacccgtggcaggttctgtggagcgcccctggctcgcagggcaattccggcagtaggtgtagtattctcctgccgtggtgcaggtaggctcttttgtatagtacttataccagctgtggcccgttgccggcacgagctctggataccacttgttgcatgtactgcaataggctcgcttctcgccggcttttgtgcaggtgggctctttgcccggaacgatctcccacggcccgaattcgtggggcacgatgtcgccgatggaaaaggcgcagctccacctgcagacggtacattccagtacgtagtatcctccctccaggcaggttggctttttctcctcggtctgtataacgttttcatggtgttccggattattgtcgtccggcgagcacgcaagcgcggtaatcgcggatagcgccgccatgagcgcaaataccagaaatatcagaatcaatcgcagtagttttttcatttctcacccatcctttcaaagcgtgtcaattacgcccgcgaggtaagtcggcgataccgatgcataaataaaattatcaaccagctgatcctttaccgcctgccgcacttcggaggcaagcagtttatccgcgtcctcatccaccaaaagcagaaccttacacgtccaaccgagttgctttacggcactgcagatcttgagtctctcactcagcttccagattccctgtcggatgacctccatcaccaacacattggcacggcaggttcggcacaacgccagcgtttcttccggctttgaagaacggtagataaggaaatccgggtcgcatcccgaaagggattgcatgaccgcctccgacagaagtccacccttcatatccaatacaattcttcgcatttgtgcttttccaccgcctttctcttcctttgaatccttcatctatattttagccgttatcttccgtttccgcccccgccaattggataggatttgtaattattttccgttgcaaagccaaattttgtcacggttctctgtataaagaggacaaaacgtgttgccttttgtctatccgcatgatatactatccatataaatatactgattttttgggggtatgcggcatgagcaaaacgacgaaaagaagccttttgtacgccttgggcttgctggtgctcattgcgtttgccatgtggctccgatatgcaagccgacattattttcattctccggctgtcaactacttgcgaagcgcaatctatttgtttttgttcagcgtgtggtgctactctctttgggcgcgcatcgtacaggtgcaggtacggcactacatgctggcgatttcggcgctgatggtgctgtggattctgctgcgctcaatcaagttttccattgataacacggatgtagaacgcctgctgtggtatttctattattttccgatgctgtttatccccatgctgtcggtcttcgtttcccagtcgctgggcaagggagaggactttcgtctgccgcgatggacaaaacttctgtatcttccgacattgctgctgcttttgctcgttctgaccaatgatctgcatcagcaggtattttctttcccgtccggcattttatcggaccgggagtatcggtatgaggtcggttttttcttcgtgctgggctgggaagttctgtgcgcagggtttgcgtttctttcgatggtgaaaaactgtcgtatcccgcatagcaggaaaattcgctggttgccgttggttccgtttgcgctttcgctggtatatgtttatgcgtatgccaaaaatgtctattgggtctgggtgctcgcgggcgatatgaccgtgtcacagtgcctgattattgcaagcatccttgaatgctgcattcaaagcggactgattcattccaacctcggatacgatgagctctttgaagcgacgagcctgcctgttcagattaccgatcaagcgttctgctccaaatatgtatctgccgccatgcaggggactttgccgcaaagtaagctaaggcatatacagcaggataccgtctatctggatgacgatacacttttgaaacgtcataagttgcgccgcggctgggtattctggaaggaggacatctcagcgctgagtcaggttcaaaagaaactggaattgacacgagatgagttgcatgacaccggcgacgttttggcggcggagaatgcacagcatgcaagatggttgaagctgacggagcaaaaccgcttgtatgatatgatggaggcacagattgatcggcagatcgcgatgctgtgggatctgctggctgaattgcagaaaacggaggaccaaaaccgggccaggcgtttgctcgggcaggtcatcattatcggaacctacatcaaacgcagaagcaacctgatttttgtcggcgcacagcgcggtgcgatcagtgtgcaggagcttcggttatgcctcaatgaatcttccgagaatatctgtgtctatggcgccgactgtaaggcaattgtcaagggagaagaccagcttaccctcgaacaggcgacgcagatctacgacctgttcgaggccgtcgtggaaacggaactggaatcccttcgtgcaatgctgatctccgtagatgtcggtgcgcaggtagaagtatctttttgtgtttcagcggcagagtcgctctgcgggctgcgcgcgcattttcaaggtttggaatgggagcaggatgaggacgggctgcaatatgtgacgcggaagctggaaagatcgaggaggtaaaggcgcatggataggatcaaggaaagttttgacagtctccccatcgcggcctgctttttcgataaaaacggcgtggtgcggctcatcaaccgccggatgcttgctattacgaactggctgcaaaaaggcggtatacaatcgctggcagagatgcaaagcgccctgcaggcgccgccggcaagtgtgtgctgtctggatccgcaccttcggatttaccgcttttcggacggaacagcgctgcgctttgcgcaggagcagatcacaacaaaagcaggtgcccgatatacacaaatcactgccgcagacgttacggagctgattcagaagcagaaccagctaaaagcggaaaatgcgaagctggagaaaacaaacaagcggctcaggcggctgcttgcgcagatgccggagatcatccgggaggaagaaacgctggccatgaagctgcgtgtgcacgatgacattggacacagcatcctcgcgacgcggcgcgtgttgctccaaaacacagaccagaaggaaattcgtgcaaccgcagcgttgtgggagcagtccatttcagtgctttaccgctccagtcagatgagagcgcaatccgaaccgttggaagccgcaaaagaacgagcggaaaagcttggcgtcagagttctgctggcaggagatgagccgcgaacgcagcgtatgcgcgcactgattgcactggcaatcagcgaatgtgcatcgaactgtgtccgtcacgccgacggaacagagttgtatgtgtgcttttggcaaaagccggactgcatagcggtctccttaaccaacaacggtgcggcaccaaatggaaaaatcacagaaggcggaggtctttctatgctgcgtcaacgcatagaagaatccggcggcaaaatggagattcagagcgtccctcgctttaagctgatgctcagtttgcaggaaaaggaggaagcagcatatgaaggtgatgatcgttgaagaccagaccatgattcgcagtctgttggaaagctattttcgcgccgaggacggataccggatcacggcgtccattccgggcgcgaaacaagcagtcgagatgtgcaggacaaattctgtcgatctgattttgatggatgtgcaaacagagaaccgtgagaacgggttgattgctgttcgccagattaaagccatacagccgaagagtaaaattattgttgtgacttcgctgatcgacggcgccgttctggatgaggcaaagaaggccggggccgacagcctgtggtacaaggactcgacgcagaagcgcttgatggatgtcgtccggcaaacactggcgggtgaacatatttttccggatgcacccccgacagttgagatcggcatggcaaaaagcacggaatttacaaagacggaactgaaggttctgcgacatctgctgcggggactgtcctacacgcgcattgcggcggagatgggctgcgagatgtcaacggtcaaatttcatgtgtcaaaatatgctgcaaaaaaccgggctggaaaacaagcttcagcttgcgctggccgtcagcgacgtcaagttgattgctgatctggcggaagagtgatggaatttgattttcagtttgtacagccacgcaaaaaacacgaaccccgccgcagaattgctctgcagcggggttcgcttatgtgctgaagcagccgaaaagccttgttttaagcggttttcgggcatagaaaaagtccaccgtaattctaccaaaattacggtggacttttggcggagaagatgggatttgaacccatgcgccggttacccgacctactcccttagcaggggagccccttcaccacttgggtacttctccatggtgaatataaaagaaaaatgtggcggagaggaagagattcgaactcttggtcccttacgagatcactagttttcaagactagctccttaaaccactcggacacctctccatttcagaacaagtggtattataacacacagaacatactttgtcaagcacattttttgtgcattttacagagccgacttgactattattaattatacaaaaactgagtaggtttgtcaagcccataatggaattttgaccgtttttttccaaaaacaataaaacagccaaagaaaagcgcttgcaatgcgaagaaaaatgccgtatactgtttatgaaaaacaaaaggagtcgttgtgaaaatgagcaaggttgaatttgattgcggtaaatggctgcaggaagccgaagaatttgcgctgccgaattggagcgccctaccctctattcccctttatatggatcaggtgatgatgtttacaggtgaagcgctgtctctttttgaacgcgatgaaaagcagagtttattgacgaacagtatgatcaataattacgtgaaaagcggcgttgtggatcatcccgtgcacaaaaagtacagcaaggagcatctttctaagctgatgatggtgggcttgctgaagcaggtgctttccattcaggatattgccgtgctgttttccggcgatgaagacgcggagcagctttataaagactttgcggcggcgcagagcggcgctttgcacgagacggcagcgggcgtgcacccggaaagtgacgcagcggccttgcgtgcagcggcgttgaagcttgcagcggaagctacggcgcgacaagcggttgcccagcgcattttgatggcgctgtccgacgaaaaaaaagccaagaaataatcaaatttgtaacgaacaaaagcctgcatggcacatagaatgttctattcgaaaaaaggatgggatatgatgtgcgatttgcaggcttttcctatgcgctccggcgaccgattgctataaagtgcagctgttgctctaaaaatacggaatatcctcctcttccacgcgctgtacttcggcagtgacgtgaaaggtaatttcggcttttgagagcttttctgcgcggctttcccccatttcacgccacacatttggcgcggtgcggaaaatgacttcgctgagacctgcggcatcggctccgtttgcgtttttgagataagcggcgaggcgtccctcaatgcagttgacgagggcagtctcaaagcgcggaaatgcttcgtttcctacgtgctttgcggtatttgtgacggcagaaacttcggcgataacatgaattctggcggtaaacttgggctgttctgctgtgcctgtgaagataatgttgctgtttgtgctgcggactttaagcgataccgtgccgaaagcttcgtcttttacggtgaattcgccgccagaaagtgtaccctgcaaggcactaagcccctgtgcttccgccggcgtgagcacgatgcacaggcggtagctttgtaggacggctgtgccgacgggcgtgggcaaatcatcggcgcgcagaacgggcagtgcggcagtggtgtttatgccgtaaagaccgtttacaagctgcagcaaattcacgtctgccgcggccccgctgtattttgcgccgtttgaaagctgcatgaagcgttcggcggtgagatccgtctgtaacaggacgctttcggcggtatcttctgcgaggaaaactttggcggtcgggcgggaatcgtagtggcggataaagaaatccagttgttcggcgataccgctttctgcgcattgcataccgaaaaggatggcggcgttgtgcgaatacagcggcgtgcggccgctttcgagcgcgatttgactgagcgcttcggggacggtatcgccctcaccggaaaaggtgctctgccctccgtcctccgtcgtttcggaagcgagcaccgtcacgcggcagccggttgccgtgcggtctacgccgattgcgctgatgagcaagcgctcgtaaagctccggcgcgcagcccgaagcggtgagcgtcaaaataagcgaaagtaaaacggatgtgagtgtttttttcatgcggcgcgtctcctcttctttttgatgcagtcgaaaaaccaaagcaaactcggcagcatagcgccggttaaaacggaaaacggcagcagatacgctgtgcggaacacggccccgacgcgtgcggcggagtctgtgagccatagagacagaactgctgtcagcgcggctatgagtgccgtcagccacgcgcgcgggcgtgtcgggataggagtcatgcacacggcgatgcagaataatccgcaggcaatacgcacgatgagcgccatcatactgatgccgatgaaaagcgcgtccagccgctgaatgccggcaatctccgcgatggaagcgagcgtgtatgcggggaaaacttgcagcgcggcgtactcgccgagacacgagacgatgaaaaacagaagcacacccaaaaacacggtgatgccgccgttccaaacaataaagccgagcacgcggtggcttttaccgctttttgtatccgtatttgtaagaaacggcatcaaaacggcaaactcggcaagcgaagaacagcgcgctatgaagacgagaaacccctgtgcggtttggtctatgccgtcatagaaaagcggcatgagataatgcggcgtgacgttcggcgagacggcgagaaaaatcatccccatgccgagcatgaacagcgtgaaaatgcataccgaggcgcgcgagatggtttctataccgcgaatggcaccataaagtgcgatgccgagcacgacaaggacgatggaaaaacgcgaagcgacggggtctgtagtgttgacgagcagcgtcagaaaaagcgaaagactgaaaatgttcatcactataaaataaagcgcgtaaattgcggacatcggtacagaaacaccgcggccgcagttattctctgcgatttgcagaagcgatgcttccgggtggcttttgtgcagcacgaaaagcggcagagaaaacaccgtaaggtacaaaaacagcccgagcgaagagaaaatactttcaatcaaattgctgccgccgacggtttgcacattgattgtgatgctgacgatgacacgtgaaagaaacagcataaggtaaagctgcaaagcactgatcttggttttcacaggtgcttttccccctttcccgcgccgggcatgcgttgtacggaggcgttatgacgcactaatcgtttccaccccgcgcgtacaagcacatcccgcatggcggaaagccgaaatggtgcgaccggggccaaaaacggcacagaaaagcttgttttgccgcaaagctcgaataataaaaacgtaaagcctgcaagcacgccccacacaccccatataccgcctaccaaaataaaagtaaggcgcagtacagccatgggctcgtataatttcggaaccgtgtacccggtaatgaccgtgacggcgatgacgacgagcgacggtgcgctgacgagccctgcggaaacggcggtctcgccgatgacaagaccgcccacgatgccgacagagctgccgagcggtttcggtacgcgcagtccggcttcgcgcatcagttcatacataaagtaaagcaaaatcgcttctaacatgacgggaaacggcgtactgcgctctgcctgtgcaatggtaacgagcagtgtttccggcagcagctccgggtcgtgtgcggcgatgccgacatacagccccggcagaaaaatcgcaaggaaaaacgcgatgtatttcagccagcgcgtgaacgtggcgtaaaacggacggtttgcataatcgtcggcggtctgaaagttttcaacgaagagatacggcacgtaaagcgctgtgggcgtgccgtctataagcagcccgatgcgcccctcatgcagtttgccgcataaggtatcggggcgctcggtaaaacctacgcgatcaaaaaccgcgggacgctccaagtaacccgccaaatatcctgctgcgagcacgtcctttagattacatgcggaaagccgctttttgagtgtgttaatgatcttcgggtcagcgatgttttttaaatagcacagcgcagccggtgtttggctctcttcgccaaccgtcaccttttcaaatttgagctcggtcgttttgagacggcgtcgtaaaagcgaaatgtttgtctggtaggtttccacaaagccttcgcgggagccgcgctgcatgacttccgtatcgggctcatctaccccgcgcgcagcaaagccctgcgtgccgaacgcgagcgctgtcggacagttatcgagcagcagcaccgcaaagccgttcatcatgcgttcaagcacttcgctgacggtggaaagctcggcttgctctacggcgcacagcacgttttcttcgataaacaaaagcgtttctttgccggtatccgtcggaattttcacgcgcatcaacggatttaaaatgctcaaagtaatgtgctgcttgctgacgagcccgtccatggtgagcagcgcggccggtaccgtgccgaccataaattcgcgctcgatataatccatggcgttttcaaataatccatttatatatgttacgttttcctttaagtgttcagataagttttccattagcagtttcctttccgcatggttctcctatgtagattttacagaaaggccgtattttatacgcccgaagacgcataatagcgacgaagacatacggaaaggaaaacgccatgtttatttcgtttgtgcgcacgatcatcttgtattttacgattattttggctgttcgcgttatgggcaaacggcagatcaaccaactgcaaacgagtgaattggtcgtgacgctgctcatctccgaccttgcggtgatcccgatgcaggacagcggccagccgcttttcagcgggctcattcccattttggtgctcattgcgctcgaggtgctcgtttcggtttttatgcttaaaagcagccgctttcaccgtttggtgtgcggcaagccggtcgtcatcatcaaagatgggcgtatcattcaggaaaacatgcaggagctgcgcatgagcgtagaagatctttttgagcaactgcggcaaaaggatgtttttgtgctttcggatgtgacatatgccattgtagagacgaacggcacgctgagtgtcgttaaaaaagccgccgtcgattacctgcgtccgagcgatatgggcgtgaaagtgaaagacgagggccttgaagtcgttgtggtgagcgacggagacctttctgtgggctctatgcacttgtgcggcaaaaatgaagagtggatacacagcatattaaaaagcgaagccgtaccgctttccgaagtgtttattctaacggtaaacacagccggacattatacgctcattcggcgggacggcagcctaaaaaagggagtgaaaaaatgaagcgcatggccttttcaatcgttttggcggtatttgctgtggcggtgtgtatctttggttactgcaacacggcaagatctgcgaatacactgattgtgtccgcggaaaatatcgaccggctgctttccgacggcgaagcggaaaaagccttggagaaaagccgaaaattgcaggcagactgggagaaaatacacgataaactgtgcgttttcctgccgcacgagcatttggagccgctggaaaacatttttgccgtgctgccctattatattgagcaggaggaagtgtccttagcgcgcgccgaatgccagatggtgaaaaacacagcggagcacattcaaaaaacagagcgcatcgcatttgaaaatgtgttttaaagcaaaaaaacagcagccccatatcgcgttgggactgctgctacataatctgaatttatcggttgcgctcggccttgattttattgagttcgtccatgaacgtattgatgtccttgaattcacggtaaacggaagcaaagcgaacataggcgacttcgtcgaccttcttgagcttatccatggcataagtgccgatgagcgtggacggcacttcgcggtcgagcgagttttgcaggagcgtttcaatctcgtctacgatgcgctccagtgtttcaagcggtacggggcgtttttcgcaggcgcgcaggaggccgttcaacagcttgttgcggtcaaaagcctcgcgggatttatctttttttacaacgaccaccggcacagtctcaatgacttcataggtcgtaaagcgttttgtgcagtttaagcactcacggcggcggcgaatgcgctccccctcatcggttggcctggaatcgatgaccttactttcactgtatccgcaatagggacatttcatggaaaaccctccaaagttctaacacaccaaatctgtctctcaaagtagtgttattatacaacagttttcggggaaaaatcaagcgaaaccgtatacttttttctattttgaccttaaaatcggaaagaaacgtcaaatctctgcgattttcgcccgcaggacgtgattttgtcccggtttttgcttgatttgaaagctatctttcggtataataaaacggaatatgaaccgaggagaacaactatggcaatacttacggtgaacaacataaaaaagatgttcggcaccgatgtgatcattcaggatattacatttgaagtgcagaaaggcgaccgtattggccttgtgggcattaacggctccggaaagacgacgcttttcaaggtattgaacggagaatatacggcggacgaaggcacctttaccccggcgcgcgaaacgtccgtcggctacatggagcagcatgtttgccgcgatatggaaaaaccggcgtttgacgaagtgatgacggtgttcgcgccgctgctcaaaatggaagcagagatagaagtgctcacgacgaaaatttcggaaatgccggaaaaccttaacgagcttatcgaaaagcaggcggagttaaacgatcgtttcatcgcagacggcggcctcacctgccgcaaccgtgcaaaaagcacactcatcggcctcggctttgcgccggagcagatctatgctcctatcggtgttttgagcggcggacagaaagcgaaaattcaactcgcaaaaatgctgctcggcgaatcgaatttgctgttgctggacgagccgacgaaccaccttgatattccgtctgttgaatggctggaggattttctgaagaattacaacggctcgtacatcgttatttcgcacgaccgttatttccttgatgctgtgacgaaccgcacatttgagattgaaaacacgcatttgacagaatataagggcaattatacgaaatatttgcagctgaaagaagaaaaccgccttgcgatgcagcgcgtctacgataacactcagcgcgagatcaagcgcattgagggcatcattgagcagcagaaacggttcaatcaggagcgcaactatgtgacgattgcgagcaagcagaagtccattgaccgtttgcaggcgacgcttgaaaagccggaggatgatccggataccatcaaatttcagtttaaggcgagccagcgcggcggcaatgatgttctggaagcggaagagcttgccctctcattcggcgaccacaggctctttaaaaatgtgaatctcgatatcaaacgcggcgaaaaggtgttcctcatcggcccgaacggctgcggaaaaacgtctttgctgaaagtgctgttgcacatttataagcaaaccttcggcgatttccgctttggcgcgaatatcgacatcggctactacgatcaggcgcaaggcaatttagatgagagtaagacggtcatcgatgagatctgggatctgcacccctacatgacgcagacgcaggtgcgcagcgcattggcggtgttcctttttaaaggcgaagacgtgtataagcccgtgaaagggctttccggcggcgagcgtgcgcgcgtgctgcttttaaagctgatgctttccaaagcgaaccttttgatcctcgacgaaccgacgaaccacctcgatatcggctcctgcgaggcacttgaaaacgcacttttgggctacgatggcacgctgttcgtcgtttcgcatgaccgttatcttatcaacaagcttgcggataaaatctactatctcaccccttccggcacaacgctgtacctcggcaactacgacgcatatcttgaggcccgtcaaaagcaggaagccgcaaaagccgctgccgaagcggaaaatgaaaacgctgtgccgaaagccaatacagtctataagcaaaagaaagagcgtgcctctgaaattcggaagcgccgtgccgcactttcgaaatgcgagcgcgagatcgaagcggcggaagcgaaaattgacacgctgaacgagcagctctccaaccccgagacggcgagcgattacgaaaaaatgatggaaatcacgaataagattactgagcaaaaggcgcttgcggacagtctgatgaacgactggacggagctgacgctttggctggaagaaaacgacgtgtgacgaaaggaaattaaaatatatgatgaaagcaaaggtcatcaccctcggctgcaaggtgaaccagtatgaatcggaagcgatgctctcttcccttttgcagcacggctttgccgcagcggaggacaaggaaacggcggacgtcgtaatcctcaactcctgcacggtcacggccgaaagtgaccgcaaggtgcggcagatttttcgccgcgcgaaaaaagataacccggatgccgttatggtgctgacgggctgcatggcacaggcgttcccggaggacgcaaggcgactggaggaagccgatattatcctcggcacctcgaaccgcaagcgtctggtgccggatctgttggcgtttctttctgcacgccagcgcatcatcgacattgcgccgcacacgaacgacgaaaaatttgagaatctcaatgtggagaactttacgggccgcacgcgtgcatttgtgaagattgaagacgggtgcaaccgcttttgctcatactgtatcattccctatgcccgcggccgtgtgcgctcgaagccgcttgaagacctcaaggcggagcttgcggggcttggcgcgaacggctacaaagaagtggtgctgacgggcatcaacctttcggcatacggacaggaattcggtctgcatctgtgtgacgccattgaagcggcctgcgctacgccgggtattgagcgtgtgcgcctcggctccttggagccggagcagctttcgaaagacgtgatccggcgcatggcaaagcagaaaaagctgtgcccgcagtttcacctctccttgcaaagcggctgcgatgcgactttaaagcgcatgaaccgccactacaccgcagacgaataccgcaccatcgtgcgcaacctgcgcgcagcgtttgaaaatgctgccatcacgacggacatcatggtcggcttcgcgggcgaaacggatgaagaatttgcggaatctttggcgtttgcagaagagatcgcatttgcgaaagtacacgtgtttgcctattcccgccgccccggcacccgtgcctatgacatgggcgatcagctgacgaatgccgtaaaggaagcgcgcagccacgagatgatccgcgtgacgaccgcaacgcagcaggcgttttttaaagcgcaaatcggtcgcacggaggaagtacttttcgagcgcgagattcaaaaaggcgtttgggagggttattccatgaactatacacctgttgcagtggcaagcggcacgtcccttgcgggcgagatccgctctgtgcgcattgagagctgcaccgatacgcactgcatgggtgccgtgttgtaaaattcacctcgagaaatacatgtaaacaaaaacgaccgaaagcgcggtgcaaaggctttcggtcgtttttgcatatatttaagtttagaaaatcaaatttacaagcatgccggtcacgacggagcaggcgtacagcgtaccgacgatggcaaggttctcttttacgcggtggtttgtgcggaacagcacgacgaggcccacgcccgcaccggcgcataagcccgccacgcaggagccgaattgcaggctgcccagcgtgaacagttccgttaagatcacggatgccgcacagttcggaatgagtccaatgagcgccgtcaggaacggctgaaagacgctgccgtttaaaagtaagccggaaatgcggtcttccccgataaaataaatggcatagccgagcacgaggtttacgacgaggataaagagaaaaatgctgattgtgtggtgcaaggcggagtgcaacaggctgtggtggccgcagtcgcagtccgcgcacagctcctcaaatggcttctcttttttagggtggaaaaagcgctgtaaaatgaggtcggccagaaagccgaatacgatgccggaggcgactttgatgagcagcatcggcaaaatgtactgcatctgctccgggtgtgagaacagaatcggcagggcttcatcgcttgtggaaaggaacacggcgagcagtgtgccgactgtgatgatgcgtccggcgtagaaatttgctgccgccacggagaagccgcactgcggcacaacgccaaggagcgcgccgccgatggggccgaatttgccgagcttttgcagaccgcgttccattttgctgcttgcacggtgctctaaatactcaatgagaaagtacgcggcaaacagaaacggcagcgtttttaacgaatcgatgagtgcgtcgagaaagacatccagcataaataaatcctttcaaggtagaggtaacccgtcgaaacgacgggattgcgatgcccgaaaacacaaaaagtggtatacaggcttcgagccagtataccacaattttgccggattgacaagtaaaaatcagagccgatttttaccagatttctgcgttttttgcgcaatgttggcgcacttttgctgcccgtacctctacaaagcagccgcacagcgcacacatgccgttgactaagtggtcgcatgatgtgcatttttgcaaacggtctttgtaaagtgcatccggggctttttgctccgggggaatgttttcgatatattcgtagatcgagtgaaaataatctgtgtcgctgaggtctttcagcaaacaccgcctgcagggaatgcgttccatcaggagaccgtgatctccatgacggcacacgccggaatattgaagtgcaggttgttgttttcaagtgtcagcgcgtcgaaatccgtaatcttgacgtcttcgggatggtcgaagtcgttgtatgcgccgatggagtttgtcaaaatgcgtgcagatgccgtattgtacttcttgccggtcagcgtacagtcgatcgggtacgcggtgtcggcggaaatgttcgcgagcgtgatatgcacgacgccgttttcgtcttccgaggcggaaaccgtgaggttcggtacgccgtcgtagaccccctccgtttcgaggtggctattcaaaagcgttgcatcgtgatggtgcttataaagatcgaatacatggtatgtcggcgtaagcaccattttttctccctcggtgaggatgacggactgcaaaacgtttacaagctgtgcgatgtttgccatgacgacgcggtcactgtgtgcattgaaaatgttcagcgttacagcggcgacaatggcgtcgcgcatggtattctgctgatacaggaagcccggattcgtgcccggttccacatcgtaccatgtaccccactcgtctacgaccaggccgactttgtgctcgggatcgtaatggctcataatctccgtgtggcgcgtgataagctcatccatgtacagtgccctgcgaatagtctcgtaatacgtgttggtatcaaagcctgttgcagctgtttttttctcaaatgtgcccggcacggtgtaatagtgcaggctgaggccgttcatgtagttgcccgcaatgcgcatgacctcttctgtccagttgtaatcgtcggcgatgcccgggccgcaggcaatgcggaacacgtggttgtcgccgtaatcgcggacgtaggtctggaagcggcggtagaggtcggcataataggacgggcgcatattgccgccgcagccccagttttcattgccgacaccgaagtatttcactttccacggctcggcatgaccgtttttggcgcgcaggtccgccatgggcgaaatgccatcaaacgtcatgtactccatccactcactcatttcctgcacggtgccggagcccacgttgccgttgatgtacggctcgcagccgacctggcggcagaactctaagaattcgtgcgtgccaaaggtgttatcctccacaacaccgccccagtgcgtgttgaccatctttttgcgtgtctccttggggccgatgccgtctttccagtggtattcatccgcaaaacagccgcccggccagcgtagcaccggcagcttaatagctttcagcgcttccacaatatcggttcgcatgccgtttacgtttggaatgtcgctgttttcgccaacataaatgccgttataaatgcagcgtccgaggtgctcggaaaaattaccgtagatattgcggctgatcttgcttttcttttcgtcagtatgaatggaaagttttgccattttaaaaattcctccacttaaaatcggcgataagcatcgccttgtgtatgttcaatatagcatacgagagtacgaatgtcaagagttgtacgtacaaatatttatcggcgcgcgtcgaccgtccaatgttctgtgatgacatggttttccgcgacgagtacttcgctgtacaacgccgtcgttgggcagatgtgcgtcgggatcacgtagaaaacgtcaccgatcttcggacgctcgttttcaaagccgggcttcatgcgccatgtccagtgctcttcgctttgaaacatcggctcggcgttttcaaggccgataactttgccgcgcacaccgggcgggtcgcttgcgatgcccttgcagccgaggtcaaatgtgaacacgccgggcgccgggtgactgatgacacgcgtgcacacagctgcggcggggatgtacggcaggtcaggataattttctttgtagctgctgtcccacaaaaacacagtgccgggcgacaaaaagatatccgggtttgcggcgtgacatgggaacgacggactgccgcccgcgatgatcatcggcacctcaatgccgtcttcactgagtgcatcgagcacatcggcaatgctttccaccatgtccgtcacctcggcttcgcgatccatgaggtcggtggtgtgcacgtggccgtcatagcaatgcaggccgctgaatggaacattttcggacggattttcgagtgctgctttgatgaattcgtaaagatgcgccgtttccacgccggtacggttcatacccatgttgacatccgcaaaccagccgagcacagcattttgcttttcggcttcggcttgaagcgcatgcaggcagcttaaatcatcttccagcgcgtagaaatgcgttttggggaattcttttacgagcgagataaacgctttgatgttcggcccgacaagcgggtaggcgagcaaaatgtgctctgccccgcattcggcaaccattttgacttccgccaaagtcgcgcatttgaagcgatgaatgcccatagccttctgcatttcgatcatctttttcattttgtgcgacttcacgtgcggccacagtcgctctgccccgccggcgatttcgattgtcttgcgggtattttcgaaaatttcgtctttatagtagatcaaagcgggcgttaaaatgttctctacgccttgtatcgtatagagctcagtctgcatttgtgcagtcctcctcaatttttttattatattcagtatacgctggtaaaattgccctgtcaagccttgataaattctgtatacagctgtaaaattatgctgatttcctatgattgggaggtatgcgttatgattttgtttcgtcatgcgcagatttatgacggcacgggccaaaagccgtttttaggcgatttttgagctgtacgaataattaaaaatcgcataaaaacagcaccgcgcaaagagctttacggttctctgcgcggtgctgttatgttctatcaaagaaaaaacgggtctgcacacaaagaagctgacccgttttctgtacgaaatagggcttaaacctgcacatctgccggttcgggcacatcgtcgttgatgatggacttcttcttccaacggcccatgcggaacgcgatggaggtaagcacggcacccatgacccagcttatgagcaaggagatgaacagcgcatctgcagagtgcatcagtgctgcgaggccgtatgcgatcggcacacggataacgacggtcgtgatgagggagatccacattggggtcatcgtatcgcccgcgccgcgcataacgccggaaaggatctgcgtgacggccattgcaacgtaaccgatggcgagaatgcgcatcatgtgcatgccggtatcaatgacttccggcgtgctcgtaaacatttccatgagataacggccgaagaacaggatcagcgcaacaagtaccacggaaacggaaaggccgagctttaagccgtcctttgtgcccttttccacgcgatccaaacgacctgcgccgatgttctggccggtgaaggtcgtcgttgccgtgccgaaggtgaagttcggcatcatggcaaagccgtccacgcgcataacaacggtggaaaccgcgatgatcgtggtaccgaagctgtttgtaagggactgcacgaccagcatggcgagcgagaacaccgcctgtgtgagaccgctgggcagacccaaacggatgagctggaacaaaagcgcttttgtcggccacagggtgcgccacgtgatgtgcaacacgtcacgcattaagagcagacgcacaagacacaggatgccggagactgcctgcgagatgatggttgcccacgcagcgcccgcaacgcccattttaaagcccgcgacgaaccaaatatccagaccaatgttcatgccgcatgccacgagcagaaaaatgagcggcatgacggaatcgccgaggccgcgcagaatgccggaaataatgttgtaatatgcgctgccgagaataccgaggagaatgatgatgagataatcacacgacatggtgtaaatatcctgcggtgtttgcagtgcagacatgattggatgtgtaatgagcgggcccacgaccatgatgaagatggaacccacaaaggttgccgtgatcgccgtacctacagaatgcgaaagtcgctttttgtctttcgcaccgaaatactgcgacgccatgatgctggcaccgaccgatacgcccatgaacagtacgagcagcaggttgatgatcgggccgctggcaccgatggcggccaacgcgctgtcgcccacataattgccgaccacgatggagtccaccgtgctgtacagctgctgcgccaagttgccgatgagaagcggtgtggaaaaccgaatgagatttgtcgccgggttgcccaccgtcatatcctgcgctccgaaaaatgcagagagctttcctgccataataaagaatatcctcctcgccctgagatatactcgaaatttggtgattttgcaagcatatagccttacaaaatcacttgtgttttattgcttccgaatattctccaaaagatttaacgcttaacagtatatcaaaaaaggcgaaagaggtcaattaaatacaaagaagataattaaattttggtattttgccgaatttgatggttgatttatagcgaaattagcagacaatttcgtcagagattcataacgcggaacggtgtgtgaaaatgcgcttctcccctattttgcggcgaatgtattggcttttttgcagaacggtcattgccgttctgcgccagatggcgaaaagaacgcggcgggcatcacaatccagcgcagagccgagcacggtaaacagcaaaaggctgaatatgcaaaatacggcggctgataggaacagcgcgggatatgagttgagtggaagcggcaaagcttttgcggaaaaccacagcaaaacaaacaacgttccgctgcataagaattttcggtaagtacgccgtgcaggtgcatgcagcagcttgtgggacgcgtagaaaatcatatcgttcgtgcgatacaaaagcgctacgattgtcccgatgagcacgccgtacatgccaagcgaccccacaagcaaaagcgatatgagaagattgatgacggattcgatgacggaacggttctgcgttttttgaaaatgcccggcgtattcgatgacgcgctgcgcggctgcacgtccgtttgaaagcagatacgtgcagacaaaaagatgcggcaaaacgggatcgagatacgaaatatccgtcacaccggcggtgtagagcttcaaaaacggcagaatgaacacatccgccgtgagatacagcgcaaatgtgagtgccatattgtaggtttcaaatgtgcggtaaagccgcaaaaaatgcgcgcggtcggtgtgataggtttgccccagaacgaacgacacgctgccgtttatggcggagaccgccgtgccgaccatgccgaaaagcatcacgtacatggagtagacgctcgttgtttttagtccgcagacgacagagagcagtaaagcatcggtgttttgaaagatgagcccggagatctggtgtacgagcacggcacggtgctgcgcggtggcggttgtatcgggcggcacggcgcggttaagccagctatactgttttttggcgtagagtgtgagcagtgcggtttgcagtaagccgcacaaaaagcagagcagctgtacggcgatgagcgaaagtccgcaaattagcagtatgattttgccgatgctgatggaaacagttaaaagcaggttggcgttgatgagcacgtatcctctgccctctgcctgcaaaagcacgcggtattttgcctgaaacagaaagcgcacggcttgtcccatgccgccgagcaaaaccgtgagcaatacggtaaaaaacggcagctcggttttgatgaaaaacggaaacagcacggaaagcccgcaaacgagtgcggcgtaagcgatgccgactttggcatattcccggcgaatcgcattgaagataccactgacggcggctctgtcctgttcggcggcgggtttataaagtgcctgcagcgctgccgtgccgataccgctttcaagcaggtcaagatacacgagcgcctgctgtgtagcggagagcaggccgttggcttcggaaccgagctgtacgagcacgagccgcggaatgataacgccgagtgcgacggaaacaaactgactgaaaagcccggaaaaggcattgaaaaagctccttttggcacgcatggctactttacaaacacatcgcatagcgtgcggatgatgcgctgatcccgccagcgcagatagcggcagcccgcgtgccagatggtgcgcaaagcgggcaagatgacgctgccgtcctccggcaggtccttgagcagctgcggcgaaacggcggcgtttgcctcgagtaatagtgcgagcagctccgggtcttccgttttcaaaaagcgttgggcgtaaaaatctgcctcacgcatcaggcggtcgcagcacagcgtgtgaatttccggcaagtcttttttctttgagagcttcagctcagcgatgagcccgcgcagataatccttggtgcaggcgagcgtgatacgtttattggaatgcgtgccgttgtagcggtaaaccacgtcgggcacggcgtagtattctttggcttttaaaagcgtgcagagaagaaaaatgggatcttcatagacacgcagcggcggaaattgcagcttgttttcaagtaaaaaattgcgattataaataaagcgggcgaaaaaacggtcgagcggctcatcgcaggcgttatgaaagccctcctccgtgaaaacaaacatggggtgcacatcgttccctttggctttttcaatagagccgccgcagaccatggcaccgcttttttcggcggcagccaaaagcgtttcgagcgcatacgggcccggatagagatcatcggcatcgagaaatgcaatgtactccccttttgcctccgctatgcccttattgcgcgccatgcctgcgccggcgttttcctgcgtaaggcaccgcacgcggccgtctctgcgctgggcgctcgttagaacgtctgcggaatggtctgtggagccgtcgttgatgcagagaatttctatatccgtgagcgtctgcatgaaaacgctgctaagtgccgtttcgagggtgtcttccgcgttataaacgggcacgatcaccgaaattttgcacatagttcttccctccttcataaaacttaaagcacagcttgtgcagcacagtgcggtttcgtcgatagagctttttaatatcgcgcgtgacggcaccgtactttttcaaaatggcatattgttcctgcaaaagcactttgttccgaaaatcgattgccgtgtaaaagcgctgcaaggcgtatcgcttttcgatctcgtctaagcacttttgatactcggcttccggcattttgatctgcttagcggtttgaagcaagatcgtctcgtgctctgcgatgcggcgcagcttgtcggtttcggtcacatctcccgcagacatgccgttttgatattttacatagccgtaaagcggttcgtctaaaaaagcgtgcgaaaatttgtaacacaccggcagcatgagctgataattctgcccgcgccgcgcggggtagatcatgcggttcggcacggcttcatcaaaacagcgcatgcggatcatgtggcagccggcgcacaccatgccttcgccgcgcagaagataccaaaactgcatgagttcaaaacggtgcgaaaaccgcgtagcctcgcggtagagcggcattttgaggtcgctctcgtcaaaaacgaaggcgtcactgctaaccgcgccgcacgccgggtgctgcagcagatacgtagcgcgtttttcaacggagtccggtaataaaaaatcatccggatctgcccagcagagaaaatcaccgtgcgcgtggagtagccccgtttgtatcgcgccgccaagccctatgttttcctgcgtcaacacagtgtactgcacgccgctttcttttaaaatcgtctcgaagtttttcagcagctttgccgtatcgtctgtcgaaccgtcatcaatgcagatgagctccaacgggcggtaagattcgcttattacggagcgcatgaagcggtcaagtgttttttcacagttatagcacggcagaagcagcgttacgagcggtttttccatcttttccctcctgcaaagtgcggcgaaacgcttttaaagcgtcttcatatgcggccgttttggcacgcagcgtttcggtgatctccgacgcgtggatgcgtaggcgtatccacctgcgcgtgacggcagtttcattcgcaatgttttcaatgggcagcacatagggcgtatcgacaccgaaaatgtcttctgcaaggcctttggcttttacagaatacccgagtgcgagcgtgggtacgccggaagaatacgccgcgatgacggcatgtgtgcgcgcgccgatgaacgacgagcacagcgcaataatcgatttaagctgcgacgcgctttggtctttgatgaggcatacgcggccgctgtcttgaaaggcagcgtataattctttaagcggatcgcggtcatcattgccgttttgcacggcgtgcgggatgagcgccacggcactgtctgttgtgcgcaggattgtgccaatcagcgcgatgaggttacccaaaataagctttgcgtttcgtgcacggcgcagtaaaagcgggcttacattgataccgacggtgttgtgcggctgaaacacttccggaatctccgcaccgcgcggctccagcaagaaagcggaatccgggcaaaaggagacgtttcgcagcccggcgctttgcagcgcgtgcagcgtttgtgtctcgcgtgctgtgatgcggtcaaatgcggtgaggtcacgtagcagagccttactgcgaagaagcttcggttcaatcgaacagccgagcagtatgctgccgcctgcatagcgccgtgcgaggttgtgcagccgaatgcgcttttgtatatcttcgtagcagtacacatcgccgccgatagagacgagaatatcgtcgcgcgtgagcgtttgcagcgcggcacggtacggcaagacatcgagcggtgtgtaatcgtttaaaagctttaagcgcagataggcgctccaaaatgcgggcgagcttttgcggatcacatcgcttcgcgcggggcgcacatcctgcacaacgagcgggcgcgctacgccgtatctggcatcttcctccggcgcttcggaaagcagcaccgtgcggccggggcctaaaagcttagaaacggtgcgcacaagcgcttcgcacccgtggtttgcgctgccgatgtggtcatgcagaatgtaacgcacgcgtattctcccctttcaaaatcgattttgcgtgttttgcggcacggtatgcggcaaggtgcagctgcaatgcgggcagattttgctgctttaagcagtgcacgatgcatcgaaaaacgccgtgaagctccgcttcggaaagcagtgcgcaaagcgcttcatctttcatgatctctttggctttcgtgatgggatcaagtccgatatccggcgcgtaaaaaacggagaatgccgtgtatgcactgagttttttgcgaaaaaacggcttaaattccgtgtgcttttgctctgtgatgacccagtgtgcaatctctttttgcaaaaggagctgcttaaagtggtctgcttcccggcgcagcgggtgcacggcgtattgcatggcacagtgtggcgtgaggagtacgcggctgtttgcgcggtaaagctgtactaaaaattgcagatcctcagcaagcgtcatggattcatcaaatacagcgtcgacggaaagaatcttctcgcgacgcagaagcttgttccaaagatagccgaaatacccggtttcgtactgtgcttgcatgaagcaaacaggaagcgttttggaatctatgagaccgtattttggtagtgttatgcgggtaatctcaccgtttaaatccatttttaggtagctgcccatgagaatgtctgcgtcgtttgactgcggctcatgcaatgctttttcgaggtagttcgaaaacggcaggtcgtcgctgtctacaaaccacacccactttccggtggcggtttctaaagcgaggttacgtgcgcgggaaacgccgccatggtgctgcgcgagtaccgtgatacgcgcgtctgcagctgcaaagcgttctaaaatgcggcggctttcatcggtggagccatcgtctacggcaagcagctcaaaatcgcgaaacgtttgggtacacagcgcggaaagcgttttttgcagatgcctttcctcattatagacgggcagaatgatgctgacttcaggcatagtgctctctcctttgcagccacaggcacataagcggcgtgcagcggtattgcatgcacaaaagctgtatggcaagtttaaacggaatatgtcgcacgggtcggttttgcagcgcacgtttcagcgcttcgtcgtttaaaatgcggtcgattttcgatttttgttcggcctttggcaaagcacagactccgccgagtgcggcgcaggcataatgaatgatgtgtaggtcgagttgacggctaaaatcgtattccgggcagttttgaaacagtgcgcacagcttttgatgcatacgtttgtagctttcccacgcatctgctttgtgcgttgtggtgatgctgccggggttgcggtggtactcgtaaagcccttggcccttaagataaaagaacgaagcggcgcggtatcccgcacacgcgctgaatagattatcttcggaatatcgcacggtttcgtcgaaccgcaggtcgtgttcttttaaaaacgatgtacggtataaacaaacgcacacggataaaagcgggccgtattcgagatcatcgcgcatgatgagctgcggaaatacgcagcgtttgattttgcgtttgtcgtaatacccgccgtggagcgatacagagcgcagcgtgggcggcttgccggattctatgcgtatgaggtcgcagaacacaaaatcacagtgatactgctcaatcttctgcaaaagcgtttcaaaaaatgtcggcgatacggtgtcatcggcatcgacaaagccgatgaatgccccgcttgccgcaagcagacccgcatttcgcgcactgctgaggccgccgtttggcttatgcaaaatgcgtatgcggctgtcctcttttttgagccgcgcgcacagtatggagcttgcatcggtagagccgtcatcgataagtaagatttcaatgtcgtgaaaggtctgtgcgatgaggcttttaacgcaccgctcgagatatttttcggcgttgtagatcggcacaatgacgctgatcttcggcataactttcccttccttctgcaaatctcaggattttctccgcttctttatactgtgtgaaatcggtgctgcgacaggcggctttgagcgcttcttgtttttcgttgtcttggatcagcgcggcgagagcatctgtaaaaccgtcaaaatcaagcggcgcgatcatgccgtctatgccgtctcgcagctggctgtgcgcggtggaaaaatccgtgatgatgacaggcttcccgagcagctgcgcctcccgtacggcgacgcatttgccctcataaacggacggctgcacgtaaatgtcgcacatacgtatgtaggggtacgggttctcctttttgccgagcagcacgacgaaatcttccatatgtacagcttgaatggcttcgcgaatttgggtttcccggtcgccgtagcctaaaatgtaccacttaacggaaaggccgcgctttaaaagcactgtgcagattttcggaatggcttcaaagtttttcgcttcacaaaaccgaccgacggaaagcagcacggtctcgcccgcttcgcgatacatgccggcagccggcagcagcgatttgcgctcgatgaactcgcgcgcaaggcagttttcgaccgtgacggccttttgtgaaaacgcaggatacatgcgccgaaaggcttccgtgcagctttcggaaacactgacgacatagtctacgttcgtatacacacggcggtcaagctttggatttgggtgttgtgtggcgtaatccgtgtggttccacgcgactttgtacttggcgtttaccttgtgcacaagcgtatcggcgacgccgaggtactgcgcggcaagatcatactcgcccgggatattcggcaaaaacggctgcaaaaatgcagagatatactgcaagtgcgtccacgtgccgatgggttttcgcatgaaagtaccgtacaaaaaaagcgcgagctttgcgagtaatcgtgcggctgcaaatcgcagtctgccatgttttacaagcgacaagatcggctctgtataggcgtggtatgcagggatttccggcagcagacgcacatattgcggcagatcttttatgaattctccctcgcggcggtacagaaaaacggagacctgcacgcttttgtcttcgagcgcttccaacagtccgataaggctgcgctctgccccgccgatctccaaagacggcaaaataaaaagcagttttttcggttccgttttaaacgccgcctttcactttttctttgatacgcggatggtcggcgagcaggcgatgcagcgggcgcgtgagcttgctgcgcagcacggtacggcggttcatccagcttttggcgtaccagtgcacggcgtaggtgcagtctgtgatataaagccgccccgtggcatcctcgtaggggttaaaatatgttttgggaaagacggctgcgccttgcacggtttgtcgcttgccgtttggctttaagccgcattttaaaagcgcctgtgtgttgagctgcgggcagccgatgacgccgtgcttgccgtcgagcaggggtgcatattgctccagcatgaagtgcacgagcggatggtgtttttctgcgccgaagccgaggccggtcgcaatcatacggtcggtctcaaaggcaaaaaacgcgtgctcgctgcaaagcgggtccaaactgcgcacgagctcaacatctacatcaaagtaaaagccgccctcgttttcgatgatctgcaagcgggcgtaatcggcgagaaacgcgtactttttctctttacagcacatttcggtgtaaccgttttggtgaatgtcgaaattatcttcgttccattccaaaatcgtatagtccgggcagtgcttgcgccaacttgctatgcactttttggctttgtccggcagtggtgcgcgaccaaaccagcagtaatggatgattttcgggatcatacagcctccttttgcgctttacgttcggtgcgcgcggccatcaggcggatcaaaacggaaagtcctgcgccaagcggtgtgcacagcattgtaaacacctttttcggtgagcggagcatcagtgcgggctctttcgcgagaaaacacgcggcatcgtaatggatgctgtcgagtaccgtgcgcgttgcagcagccgggtacgtaaggcaaagctgccgccaatatagaaagccacgcgggttttttgcgtattgcttccacatggtgtgcgaggaaccgtcttctaaatacgtcacgtggcacagcacgcggcttaaaacggcgagtttgtaatcgcggtcgatcagtcggtattttgcggcgagcgccacgtatttttcatttggaaactccgggtacggcgggtattttcggatgatgtcggtacggtacacgagctttttgtcgcctttgccgccgcccgcatagtaaccgctgagcgtcgtttcggtgaggcccggcggaaagccggtgccaataagcttgccgtttccgtcgtcatcaagcccgatgagcccggcgtaattcttgctttttatctgtgcccagcgcttttcaatttgctctacggcatcctttgccaaacggtcgtcggaatcaaggcaaaggttcagctcggtctcgatgtgcgcataagcggtgttgtgcgcagcgtgcatgcctccgtttggacggtataggtaacggatggaaaatgctttctccgcctgcatccaggcggagaccaacgcggcggttcggtcggtggaaccgtcatctacgatgagccataggaagtttttagatgtttgcgcttttaatgagcaatatgcttccggcagcgtgtgtgcacggttatacgtcggcgtaaacacggtcagcagaaccatgtgcggtttccttccttctttgggtatctttttgcagataatacgcagtgagcatacgtgcgttttcacaaatgtcaaagctttgtagtacaggcggcgcggcgctgagcaccttactttccgccaaaataacctccgcccacttagaaggcggtgcggaaagcggaagctgccgtgcacgcggtgtttgaagacaatccttcggtacaccgttggagacaaggcacggtagccctgcggcctgcgcttccaaaacggcgagcggcatgccctcgtacagagacggcatacaaaatacatccattgcatgcaaaagtgccggaacatcttcccgcacgcctaaaaacagcacatacggtgtaagaccgagtgcggcggcgcgattttgtacggctgcccgcttttcaccgtcgccaacaaacagcagcttcgattttgtaccgcatgcgcgcagactgtgcaggacatccaagaggaaagtttggtttttctctttgcgaaactgccccacatgcccgatgagaagttcttcttttgtgataccgagcgtgcgccgcatgtcttcgcgcatgtttttatcaaagcggaatttttctgtatcgatggcgaccggcagcaccaaaaacggcgcactgccgaacatccagcgcccggcatcttctccgcaggcaagcagatcggtcgcggtacgcggaatgatgcgcttatacagactttttattggatacttgaagtcgcgcatctgatttgtggtgtgtgcgtgagcaatgcgtacaggcacgccgtgctgcttggcgcaaccgagtacaacgccggaaagacaatcaagatgggcgtgcacaacagtatacgccgggtgggcggagaaaaatttgtgcagtgcatggcggtatgcggggctgaacgggttttgccgcggcacggtgaaaactttgccgccgagagagtaaatctctttatcgtacgcgccttcccgtgcacggtgcgtcagaaaatcgaactgcacgcgtgtgcggtctatgtgacggtagtaattcatcagcatcgtttccagtccgccgcggtccatgcaggtgacagcctgcaaaacacgaagcataacggattcctcctttataaaaggccgaaggtcttcagcccgtagaaatagaaaaacagataaaaaatgagcatcatcacggttaaaatacgcacggagcgttttgaaaacatgtggtgcagctcccatggcagcaaaatgtagttataaagtgaaaagtatatgggcagccgcccgacaaaaatgccgcttgtgaacgctgagagaatgtaaatgccggtcgatacaatggacatgttgacgcaaaggtcgatgagtgggtcattttctgcacggataaaccgtaaaccgatcaaagaaagcaacgtcggcacagcgtagaccagtacgcgcagtaggtttgtaccgttgtcctcaaagcctttccaatcgctgacgacatttttgtactgcgtttcctgcaaaagcagctccaaaatgtttgtgaagcggtcgatgaaaagcacaaccaaaacagtgagcagaagaaacaaaagcgtttttcggttccatgcttttccgcgtgtgagaaaaacaaacggtagtgcgaacagtgccgaggcatgcagcgtggcggcaagtagaatgatgagcacagcttgtccgtatctcttgcgcagcaaaagcggacagcaggcgaacacgagcgccgccgccaaaaattgccgcatgccgttcatcatccaggagatataatccgtggaagcgatgaacaaaaacagactgatgcagtagctttccgaataaagccgatagtttttaacgagcggccagagctgaagcgcggcgagaatgcaaaaccaaacgcgcacctgcccgccgcacaaaagcttgatgagtgcggaaagcaggaaaaagccgtgatctttctgtaaagactggatgtaatcgggcagtgcgctgaatgtgctcggcatttcggaaaacgcgtgcatgtagttataggtatcgccgatatcaccgcgcagtgtacagaagatgagcagcggcagtacgccgagcgttgcccagagcttcgtgaaccgcactgtctgcacgccgcagacagtttcgctttgctgtacttccaacacggcggagagcgccgtgtaaatcagaagccaaaggagcatccaaatataaccggacatgtgttctcctctatgccgtgacgcgccggggctgcggtgccgctttttcggcggtgacgatgcgcagtgtttctgcaacaacgctcgctttatcgaattcacgctccattttgcggcggccgttttgcccaagggctgctttttgctctgcggaaagcgccaaaaacgcgcgcatggcaacatataggctgtccgcgtcttttgcgcggcacaaaaggccggttttgctgtgctctacggcttccctgcacccgggaatatcggacgcgatgatgggcctgccgacggcggcagcttccagcagcacgttgctcatgccctcgtggtagcttggcagcactacgcagtcgcagttttggtaaaacggcagcggttctttttgaaagccgaaaaattctgtcatgccaccggaaaccaggcggtctacctcctgcctgtactgctcctcaaaaaagccgagcagctgcaaatgcacgtgaaagccctctgtccacagcctgcgcacggcgcaaaacagctcctctacccccttttcgcgcatcaaacggccgacgaacaggaatcgcggcggatcatgagcggtgtacggcgtgtagatatagcggttcaggtctacacccgcaccatgcagaacgatttctttttcgggcggcaggatgtgtctgcggcaaaattctaccgcattggactgattttcaaagaatacgttctgtacacgcagaaacgaaagcttgtaaaggaatgtggcagcgcagctgagccacgggcgctgaaaagcgctgccgagtccctgtacggtggcgtaaaacggaatgcggtagcacgtgcagagaaaacccatgtatacattcggcttaatggcgtatgtaagcacaagatccggcttttccagacaaagaacacgtttgtacgcctgtaaaagacgcaattcagaaagcacctgcacgcgtcgccgctgcattttcgtttccgtgcaacgtatgctcatgctttcaaatacttcttcaccggtttgaaacggcgctgcaacgattacctcataccgggattgcagctcttcaatcagctcccgtcgaaagcggtacagcatataaaaatgatttgccgcaatcaatacttttttgcgcctgtattcggaaaaatcttcgtttatcgcgaaattttcacgtttttttgacacaaatttgctgaataaggtcaaatgcaacagatgtgccgaaaagcgcggtattttgcttttacacattctaaacctccgtatagcaagatgaaatgtatctgtaccggtgctgataccgttattgtacaatgcgagaaaaaagaaagtggtcgaattctttgtgaaagcagacatttatttttgctttttctttgtgtccgtcaagcgaagacgttttactattactgcgggggctttgaatataaaaaagctccctttacgggaaaccgtgcggatgcacacagttcctgtaaagggagcaaaattccttttatgcggttttaaagcggaagcctgcggaaaagcttacttcgcgagcttttctctgatgacctctgcaatatgctctgcggaaaggccgaattccttcagcagatccacagccgggccggagtggccgtacacatcgttgacaccgatgcgcgtgacaggcgtcgggcaatgctcggaaagtgcggtggagaccgcttcgccgagaccgccgatgatgttgtgctcttcaaccgtgatgacacggccggtcttctttgcggaagcaataacaagctcttcatcgagcggcttgatggtatggatattgatgacttcaacgctgatgccttcttctttcagtgcatcggcagccttaacggcttcctgcaccatgagaccggtcgcaacaacggtgatgtccgtgccctcgcgcagcgtgatgcccttgccaagctcgaacttgtaatcatcgttgttgttgatgctttccacagccagacggccgaggcggatatagcacgggcccttgtgctcaacagcagcgcgaaccgcggcctgcatttcgtaatgatcgcaggggttcagaatgaccatgcccgggatggtgcgcatgagcgcgatgtcctcgcagcactgatgtgtagcgccgtcttcaccgacagagatgccggcgtgggagccgacgatcttgacattcagcttcggataaccaacggagttgcggacctgctcaaacgctctgcctgcggagaacatggcaaaggacgccgcaaacggaattttaccgcaggtggccagaccggcagcaacgccgaccatgttgcactctgcgatgccgcagtcaaagaagcgttccgggtatgcttttttgaagatgcccgtcttggtggcagcagcaaggtctgcatccagaacgacaatctccgggtattcagcggcgagcgcggtaacggtctcgccaaagctttctcttgttgcctttttaaccatttcagccatatcagcagccctccagttcatgcagtgcagcggtgagctcctgcatagcggtctcatactgttccttgttcggtgcggtaccgtgccagccgacctgattttccatataggaaacgcccttgccctttacggtcttggcaatgatgacgctcggcttgccctttacggtctttgcacgtgcaaaagccgcttcgatggcgtcgaaatcgtgtccgtcgatggtctgtacgtcaaagccgaaagcctcgaacttcttgtcgatcggttccgggccggcaacttcactgaccgggccgtcaatctgcaggccgttgaagtcgacaatcaggcagagattatcgaggttgttgtgggatgcaaacatagcagcttcccaaacctgaccctcttcaatctcgccatcgccgagcagagagtaaacacggtagtctttgttatcaatcttgccggcaagcgccatgcctgccgcagcggaaatgccctgaccgagagagccggagctcatatcgatgccgggggtgcccttcatatccgggtgaccctgcagcatagcgccgatgtggcggagttttttcagctcatccacagagaaatagccgcgctgtgccagtgcagcgtaaagacccggtgcgcagtggcctttggaaaggacaaaacggtctctgtccggatccttcgggttctgcgggtcaatgtgcagttctttgaaatagagataggtgaaaatatccgcagcggaaagggaaccgcccggatggccggatttggcgttgtaaacgccttcgatgattccaagtctgactttggcagccgtgatcttaagctgctgcttatcgcatgaattcatggaagcctcctgtgtttttagcgcccggcacgggcaatcccgtaaaaaccgcagcgcgagtcattatggtcttattatagcgcatttcggtggcctttgcaacgctccacgccaaaatttcgcccgttttttcgtgctttttgcatattcaccgtatgtggagagacaataggcacagcggcgcttataaaagccttaataggtacgtacagcttttggctgcgccggaaaaacggaaagaacaaaccaaaattacaaacggaaaggaacatcgttttatgtctcagaggatcggcaacctgcctgccaatatcaacattatgaaccctgtaccgaacaaggatgcgaagaccatcatgaagctgatccgcacgaatggcaagatctccggctaccagctttcggatggcacggtgctttccaaggcggacggcgtggcgcttgcaaagcagggcggcatccgcggcgtggcgattgcgagccgcaacggcagtgaatatctgcgcagcataccggacggcaaggagagcaacaatttaggtgacctcccaagcaccgacctgcgcggtctttcctaaagaaaagggagcctgtacattttgaaacgcaggctcccctatttttgtttattttgtgttttcgagcgcttcacggtaaatttgtacagcgtgttcggcaacggcgacgctgtcaaacggctttgccgcagcacgaattttggcttcatccagtgtgtccgaccgtgcagccatgcgcaaaattgcatcttccatatctttcgggtcacgcacattgcaaaactcggcgcagtcatcgttcaaaaagctctccgggcctttgcaccgtgtagaaatcaccggcacgccggccgcgagtgcttccacggcaggaatgccgaacgtctcaatatccgaagccatcaaaagggcgtcggtctggcttaaaatctccgcaatttcactttcggtcttgcgcccgacaaaggatacaatatcgttcagcccgaactcagatgcggtctttttataaaacgcttcctcctgcccgtcgccgacaatcgtatacaaaaacgatttttccgggtgttgctctcgcaagagcttcaaggcctgcaaagcgtcttccacgcatttgccggggcgcagtgcggaaactgtcgtcaagcgaaaatgtgccgggtctttcgttttttttgcgccgcaaaatgccttggtgttgacgatgttcggcaggtatattgtgtttttcttttaaaatgtccgtcatatagccgctgacgcaggtcatcacgctgtgccgtgcagcatagagtccgtattttgcggtgctaccctcaaagaagcgctcaaaatatgaggagtgctccgtgatgacgaccggaatatgatatttttctccgagctttgcagcggcgtatccggcgggcacggtgacatgtgcgtgcagaatgtccggcttgccgtgcttcttcacgtaggctttgtaaagcttttcaacggtgcggtagtaagcgctgagctgtgcatctgcgctgaatttggagatgtccagcatacggcggcagtatgtcatatagccgatgttcgattcttcgtagagcttctgcatcgtggggtacttcggtagtgaagacagcccctgtcggtctacatagagcatgttggcttttacgccgtattccgcaagtgccgtgcagaacagcttgtggtaaacgccgatcagtttatcctcaccgtttgggtaccatgtgggaatgaccaaaacgtgaagcggagaatttttctgcatgagtcttttggttccgatagcgcgcgatgcgcagtctatcgaaaaatcctttcattcgtagtatggaaaaggctatttaatttctgcgcacgaatgcctttttcggcattttgcagaccgggcacacccagttgtccggcagttcttcaaagctgaagttcgggtcgctgtacacatagccgcacacggagcagacaaagctttcaccgctgctcttgtcaaatgtgctttccggcggcacataggtcggcgagccgaccggcgacagaccgtgcatttcactgcggtagaaatcatacgtcatcggcgtgccgatggcgctgtcgctgcccgctatgatctcggcggcgaagaccatctcctgccctacgtccatgccggagatgaccttgcataaaaaccaacagcaggtgttctcctttacgacgggcacgccttcaatgagcaccttgtggcggatgtttttcagcttgtctgcatttttaccgctgacaagaccgagtgcgccgatgacgctggcaggtgtatctgtggagagtacagaaatggtaaaaatgccgttttcgcggattgcggtgcagctgtgcgtatcttttgtcagcgcaatgagcactttttcggggtcgctgctggaaatttggatgaccgagtttgccacacaggcgttcgggcggccgttatattttgtgccgatgacgtacatgccgtatgacaaatttttaaggactgccgggttcatggcggtgcacttccttccgttatgttaatagagtttatgagctgtgctttcgttttatgttttcccaatacgctttaaacgcctgctcgtttttgttgtctccgtagtgatagtacgaagcgccgagcaaggcatccggaagatactgctggtcgagccaatgatccgggtaatcgtgcggatagcggtaaaactggccttttttggcgacatctgaaccgtcataatgcacgttttgcagcgtgcgcgggatcacaccgagtttgccggccttcacatcgcgcatggcggcatctatggcagattcaccgctgttcgatttcggcgccgtcgccgttaaaatgacggcatccgcaagcgggatgcgcgcttccggcagaccgaccatcatggcggcgtctacggccgctttcacgatagggatgatctgtggccacgcaaggcccacgtcttcgcaggcgcacaccatcaagcggcggcatgcagaggcgaggtcgcccgcttccaaaagccgtgcgagataatgcagcgccgcgtcggggtcggagccgcgcatggatttttgaaacgccgaaagaatatcgtaatgcgcgtcgccgtctcggtcataccgcatggcactgcgctgtgtaagctgctccgcaagctccatggtgatgcgcggctcgtcctcgcttcgtacggcagtcgtgcaaagctctgccgcgttcattgctttgcgtacatcgccgccgcaagcggaagcgatatacgaggtcacgccgtcttcgagccggatttcttcgccgaggtcttccgacaaaatgcggaatgcgcgatctgcggcgcgggcgacctcctctttttccacgggcttgaactcaaacactgtggagcggctcaaaatggcgttatatacgtaaaaataggggttttccgttgtggaagcgatcagcgtgatgctgccgttttcgatgaactccaagagcgtttgctgctgctttttgttgaaatactggatctcatcaaggtacagcaaaacgccgtttaccgcttgcagcgtgttcacctgcgccaccacgtcgcgaatatcggcggtggaggccgtggtgccgtttaacttgcacaggtgcatgtggctttgctttgcaatgatggacgccacggtggttttccctacgccggacggcccgtaaaacaccatattcgggatagtgccggattcgatgatgcgccgcagtaccttattagggccgagaatatgctgttgtcccaccacatcatcgagcgttttcgggcgaatgcggtctgcaagcggtgcgttcatcgtgttctccttttagtcgttataaagcggatatttgctcaaaagctctgtgacctttgcgcggatggcgtcggttttgttgtcgaaatcggtcgcacacaggtggatgcattccgcgatgacgtccatatcggcttccttcaggccgcgcgtggtaacggccggtgtgccgaggcgcacgccgcttgtgacgaacgggcttctctgctcgttcggaatcgtgttcttgtttgcggtgatatacacttcgtcgagacggcgctccagctctttgccggtcagctcgccgtcggaaagatcgagcagcatcagatggttatccgtgccgccggaaacgagcttcatgccgcgttttgtaaggctttcggcaagcgctttagcgttttttacggtctgctcggcgtaggtcttaaactccggcttcagcgcttcgccgaggcacacggcttttgcggcgataatgtgcatcaacgggccgccctgcgtgcccgggaaaatggctttgtcgatttttttcgcgtactcctcacggcagaggatcatgccaccgcgcgggccgcggagcgttttatgcgttgttgtggtgacgacatcagcatacggcaccgggttcatgtggcagccgcccgcaacaagacccgcaatgtgcgccatatcgaccatgaggcacgcgccgcatgcatcggcaatctcgcggaatttcttaaaatcgatcgcgcgcgggtatgcacttgcgccggcgacgatgagcttcggtttaagttcgcacgcctgctccatgagcttatcgtaatcgatgcggtgcgtaacggggtcaacaccgtaagccgcaaaattatagtaggcgccggacatgttgacaggagaaccgtgggtcagatggccgccctctgcaaggttcatgccgagtacggtatcgcccggctgaagcagcgcgaaatatacggcaaggttcgcctgtgcgccggagtgcggctgcacattggcatgctctgcgccgaacagacggcaagcacgctcacgggcgatgttttccacaatgtctacatctgcacagccaccgtaatagcggtgacccgggtagccctcagcatatttgtttgtgagtaccgtgcccatcgcagccataacggcaggagacacaatgttttcggaagcaatcagctccagattgcggcgctggcgtttgagttccagctccatcgcttcgccgacctcggggtctgcggtttcaacaaaaccgatcgtgttcagaagatcaccgtacatacttcatctttcccttctaaaaataatatgctctgcggtttatgtgccgcagtacttcactaaattataccctattccatttaaaatggcaatagatgatttgcaagcacataatggatggcgtaaagcaataacatatgtgccggatagctgatatagaaaaaatatttgagcgaaagcgcgccgcgcttgccgttatagagcagcacggggatcgcggcggcgatggcatacagctgtgttgtgttgccgtcctgcgtatattgcccgtaggtcagcgccgcaaacgccacggcatcaataccgcggtacttctggaacaaatagaaacaaagtaccgttaaaacaccgtaaacgccataactgaaatgcaggaaatacggcaggattgtcaagatcactgcgccgatgaacatgaaaatattgcggcttttcgcggaagcatctaaaagtttcatcacaaaaagcgccgttaaaaacgtgaacaggatattttgccgctgaaactcaagccatgtaccctgaaataaaaggtcatacggcacttcggagagcaaagcaaaaatacccatgcgcagtgcgtagcggttaaaattgcgtgtgtgcatgtagccctgcacgagcaaaaacgcgtagatcggcatggaaagccgcccgatatagcgcagccagataaactgcgggaagaaaatcgccccgacatggtcgatgatcatggtgacgagcgcgaggagctttaaggtaaacgcagacattctttttcccctttgcggttatttgtcggtctttcaataaaaataaatttaccacccttttccggtattgtcaaccgaatgaaaaagttgtagaataaacgtaaagcattctgacgggcttgcccgccgctttttcggaggtttgtatgacaaaaaaggaacgtgcgcttcttgctgtggaagcgctgaaaaaagaatatcccggcgcggtatgttcgcttgaatatcaggatccgctgcaattacttattgcaacgcgactttccgcacagtgtacggatgcccgtgtgaacctcgttacaccggcgctttttgcccgcttccctacgctggaagccttctgcgcgggcagcgaggaagaaattgcggagctcatccgctcctgcgggttatataaaacaaaggctcgtgatatttttgctatgtgccatgtgctgcgcgattcgtataacggcgtgattccggacacggtggatgagctgacaaagctgcccggtgtgggacgcaaaaccgcaaatctcgttgtgggcgacatttacaaaaaacctgccgttgtgacggacacgcactgcatccgtattacgggacgactcggtctgaccgaaagcaacgtgccgctcaaagtcgaaaaagacctgcgcgcagtcttgccgccggaggagagcaacgacttttgtcaccgtaccgttttacacggcagagcggtctgtacagcgcgtaatccgaaatgtgctttgtgctgcatgaattcgttctgcaaaaatcccgtgaacccgatagagtaaataaaactaaaaacgcagcgtttttccgttgtgttgttcttgataaaagaaaggaagctactttttatgttcaagttttgtaagacccagctttgggagtgctcccgcacgctttccgatgttgcaatgggcagaaagcccgcagagacggtcattcgcaatgcgcgtctcgtaaacgtctgcacgcatgaaatcctcgacaacatcgatgttgcaatttcctgcggccgtatcgcacttgtcggcgatgccgcacactgcatcggtgaaagcacaaaggtcatcgatgccgagggtcagcttatcgccccgggtttccttgacggtcatatccacattgagtcttccatgatgacgccgatcgaatatgcaaaggccgttatcccccatggcaccgtcgggatttattatgacccgcacgaagtctgcaatgtgcttggcctcaaaggcgttgacctgatggcggaagaggcggaaaagactccgctgaaggctatgctgacgaccccctcctgcgttccggctgttccgggatttgaggattccggtgcggaggtcaccgctgcggatattgcctcggaaatgaagcacgattataccgttggcctcggcgaaatgatgaacttcccgggcatcaccgcttccgcggagccgacgcacaacatcaccggcgaaacgttgaaagccggcaaaatcatcacaggtcactattccatcccggagacgggtcgcggcctcaatgcatacattgcaagcggcgtgcgctgctgtcatgaatccacccgtgcggaggacgcactcgcaaaaatgcgtcttggcatgtatgccatgctgcgcgagggctccgcttggcacgatctgcaggaggtctccaaggccatcacggagcacaaagtggacagccgatttgcaacgatgatttccgatgatacccacccgcatacgctggttgcaaacggtcatctcgatcacatcgtgcgtcgtgccgtctccttcggtatcgattttgtcaccgctatccagatggtcacgctcaactgcgcacaatgcttccagatggatcacgagctcggctccatcaccccgggcaagtgcgcggacatcgtatttattgataacgaaaaagacatccgtgtcacccgtgtgctcatcgacggcgacgttgttgcagaaaacggcaagctgacgattgacctgccgaagtctgagcttcccgcatgggcgctcgacacgatgcacgtcggcgagacgatcaccccggaaacctttaaggtacataccgataaggttggcacggcaaccgtccgtgcgatcgagattatcccggtacatgtcggcgactatgagcgtcacgttgaactcaaggttgaaaacggcgaattaaagagcgatgtggagcaggatgttttgaagacattcgtcttcgaacgccacaataagaccggcaagcacggcgttggctttgtcaagggattccacgtcaagtgcggcgcaatggcttccaccgttgcacacgatgcacacaacctgctcgttgtcggcacgaatgacgaagatatggcacttgctgcaaacacactcattcaatgcggcggcggtgagtgtattgtgcagaacggcaaggtgctcggctgtgttccgctgccgtttgcgggtctcatgaacacaaagtccgctgaagaaatggacgagctcgtcgagaacctcggcaaagcttgggaaacgatcggctgcgacattcaatctccgtttatgacgatggctttaatccccctcgcctgcctgccggagctgcgcctgaccgaccgcggtcttgtagactgcaccaccttctcttttgcagaccttgaggttgaataagaccgtttgaaagtagattaccttattttagaatgggaggaattaccaatgatctatgattttgaaacgctggtttccagaaaaaacaccggctccggaaaatgggacgagatgacaaaagagcatccgaacctgccggaaaacgttgcaccgctttccgttgcggatatggagctgaaaaacccgccggagatcgtagagggcctgaaaaagtacatcgatacgcatatcctcggctataccggccccacagaggaatacttcgatgcggtatgcggctggatgaagcgtcgcaacgactggaatattaagaaagaagaaattgtttctacacacggcgtcgtaacggctctggctgtttcggttctggcctataccgatcccggcgacggcgttatcactatgccgccggtttattatccgttcagaatgaccattgagcacaataacagaaaaaacgtggagtgcccgctcatcaacacgaacgagacatacacgattgactttgatctctttgagaagctgtgcgcagaagaaaaaaacaagatgtttatcttctgcaatccgcacaacccggttggccgcgtttggacggaagacgaaatcgcaaagctcggtgccatctgcgcaaagcacaacgtcatcgtggtcagcgacgagatccactccgacctcatcatgccgggtcataagcacgtggcatttgcaaacgcctgcaaggatgcactgccgaagtatcttgtttgcaccgcgccgagcaagacgtttaaccttgcgacactccagacctcgaatattgttattcccgatgaagaactgagaacaaaattccagagtattttacagcaacacttcacgccgtccgccggtgcactcggccttgaggcttgccgtctcggctacacggagtgcgaaggttggcttgcagaagtcatcgaccttatctacaaaaactacaagaacttctgcaagttcattgacgtaaactgcccgggcgttacatacagcgatctgcagggcacatacctcatgtggatcgactgcacgacgttcggtctcgatgatgaagcgctcgataagctcctgcgcaaacatgatcttttctgcgacgccggcacgctgttctcgcagggcggcaccatgcatacacgtgtaaacctcgcaggtcccgaaaagatgctcaacgccgcgatgcagcgctttaaggacgcgtacgacgaagcgaaaaacgcgtaagcttgctcctgaaattccgtaatgtataacaaaaggcgaactgcacaactccgtgcagctcgcctttttgctatgttgttttactgaatgccgagcgcgtctttcgctaaacggtcggcgaggtcgttgtatttgtcgccggagtgccccttgactttcacaaagcggaaacggatgtgctttgcggctgcggcgcagaattcgcggtacgcaatggtgccgggcttttttgctttccattctcccgttgcccattttgctacaccctcgtaatcatggtagattgtcacggagggcacatcatgctcgatgcagtagcgcagaacagtttcggagcccttgatctcccctgccacgttgcgcatttcggcaaggtcggggtcagtgaatctttcggaaaaatgcagctcttcgccgtttaaaaacagcacagcaccgcaggaaaactcctttgtgccgatgtggtagctgccgtctacgtaagccacggcgccgtcttcttcaggcgctgcggtcgtgttttctgccggagtggctttcgtcagatcgttttcaccgcgcatataggcttcggcttctgcaagcgttggaaagcttttgaacgacgcgcctttaaagccggtcgtctgcgcacggcattcgtcccacgtttcaaaaatgccggtttttcgcccggcgcggacggcgtagtatttttttgccataaaatgaaattccttttcgtttattcaaagatcggggtggaaaaataacgatcgccgctgtcgggcagaagcgccacgagcgttttttctgcattttcgggcatgcgcagcaggcgcacggctgcggcaagcgccgcgccggacgtgatgccgacgaggatgccctcggtgcgggccaataattttgccattttgtacgcttcttcatccgtgacggtcagcacttcgtccacaacggaagcatcgtagtttttcgggatgaagtttgcgccgatgccctgtaagccgtgtgcaccgcttttgccctgtgtgatgagcggtgaagtcgccggttccaaaccgacggtgtgtacctgtggcagatgcttttttaaatagcgcgccgtgccggtgatggtgccgccggtgccgatgcccgcaacgaaaatgtcgagtttgccgtctgtttgctgtacaagctccgggccggtcgtttcataatgtgcggcggggtttgagggattttcaaactgcgcggggatgaagctgccgggtgtacttttcgcgatctcatctgccttttcaatcgcaccgcgcatgccgtctttgcccggtgtgagtacgatttccgcgccgtatacggaaagcagcttgcggcgctcggcgctcatggtttccggcatggtgagcaccacgcggtagccgcgcgccgctgcaatagatgcgaggccgatgcccgtgttgccggaggttggctctacaataactgcgccgggcttcaatttgccggctttttcggcgtcttcaatcattttcagtgccgcacggtcttttacgctgccggcggggtttaaatattcaagcttcaaaagtggcgcgttggaaatgcccgcagctgccgcaaagcgggacgcacgcaaaagcggtgttttgccgatgagttcggttacagatgaagcgatgtgttcatttttcataagacagatcctccctttctatatcgataccattttacccccgattttacgcgcggtcaagagcgcgatttttgcaaatcttttgcgtttgtaagagtttcttaagttgtttattttttgtcttacctgtataatagaaccatcagagagtccgcgccgggtgttttgcgcggaggaaaggactgactttatgactaagaaaaagattttcacaatcgccggtattgccgtcggcgctgtgatcgtgatcggtattgtaatctggctcattttcttccgcggcggcagcgttgcgccgagcgacccaaatgagatggtgtatgtgacgagcgtttcggacatcaccggcacgggttcacttggtatgacggcgaaatactccggcgttgtggagccggaaaagacactctccgtgcagaaggacgacacaaagaaaatcgcagagctgtatgtgacggtcggccaggaagtgaaagttggcgataagttgttcagctacgatacggacgacctgcaaatgcagcttgaagaggcgcagttacagctggaaagccttaaaaaccgcatttctacgctgaaccagcagattgattctctgcagaaggaaaagaacaaagcgtcttccgacgaacagctttcctataccctacagattcagtctgcgcagcttgaagtgaaatcgacggaatacgatcagtctacgaaggcgaaagagatcgagaacctcaagaaatcgcttgaaaatacggatgtcatggcagaaatggccggcgttgtgaagcagatcaatgacggttccaataccaacacaagcggcagcaattctacgaacgcgtatattacgattctcgcgacgggttcttaccgtgtaaaaggcacggcaacggagttgaatgtctattccttgcagaagggcgtgaaaatgaaggtcgtctcccgcgtagacccggagcagacttggacgggcaccgtggagagcattgaacgcgaagccgcaaacgataataataacagcggcgtttccttcggttccgaaagctcgtttacaaaggcgacaaagtataacttctaccttgtgctcgatgatttcaaaggtctcatgctcggtcagcacgtttacgtggagccggataaggccgaagacgtgaagactggaatttggctgccaagctactatattctcaacgaaggcagcaaaaactacgtttgggccgtaaacgataagaatcgcatcgaaaagcgtgaagtgcagctcggcaagtttgacgataccctttccgaatatgagattacgtccggcgtgacggcagacgatcgcttggccgttgtggaagaccgcgtgcacagcggcatgtatgctacggacgatatttcctataagaaccagggtgacgattccacagatatggatgccgcaaacggtgacatgaacgatgccaaaacggacgatgcaaacggtgttatgcccgcggaagacggcagcgatatggacggcgacccgaacggctacagcaccatgcccgcagaaagtgctgtaacggagtccgagggcgaaacggacacggcggatagcgcgacgtcgagctttgaaaccgttatcgggggtgctacggcatgatcttagagctgcacaacatttataaaacgtatatccaaggcaaaatggaagtaccggttctaaaagacatctctctttctgtggatgagggagaatatgtcgccatcatgggtccgtccggctccggtaaaacgacgctgatgaatatcatcggctgccttgatctgccgacttcaggcacgtatgcacttgcgggtgagaatatcatcggcaacagcgaatcgaagctttcggaaattcgcctcaactccatcggctttgtgttccagagctttcatctcttgcctcgccagagcgcggcggaaaacgtggcgcttccccttttatacgcaggggtgccgaaaaaagagcgacgtgcgcgtgccgtgcgtgctttagagcgtgtaggtctcggcgaccgtgtggattttaagccgaaccagctttccggcggccagtgccagcgcgtcgcgatcgcccgcgccatcgtcaacaatccgaaaattcttttagccgatgaaccgaccggcgcgctcgacagccagtccggcgcgcagattatggagctgttccagacgctcaacgacgagggtgtgaccgttgtgatgatcacgcacgatctcgatgtggcaaaccacgcaaagcgtgtgctgcatattcgcgacggtcagtttgcggaacaacatatccccgaggaaaaggaggcgaaagcatgaatctgccggcaaatttcccacttaaaaaagtcatgatcacggtggtctccgtagtgatcgtgatcgcgctgatcatcaccggcgtgacggtcgcggtgaacggcaaggcggcaaatgccacggtggatgtggagcaggtttcaaatatctccacacagtattggggcgaccagtccagcacctacggtaatgctacaagtgactttgtgcaggaactttaccccgataaagaaaaagctatttctaagattttcgtcaaagagggcgatactgtcaagattggcgatacgcttttgcagtatgatacgacaaagctccagctgaaggtagagagcaaggagcttgaagaaaaaaagaagaaatacgaactggagcaggccgaaaaagaacttacgaagctccagaatacggcgccgtatgtggcgccggttatcccggagcccgagccggaacccactcccacgccggtgccggaatcgcaggcggaactgtatacggagattacagagcactcgaagccgtttaaaggtgccggtacggaggaagacccgtatgtctttctttgcacggaagatgctgtgctgacgaagggctttctcttgaagctgctcggcgtgacagacccgcgtgcgacccctacccctacccctactccgacccccacaccgagcgcagagcctacggcacagccgagtgaagtgcccacggcggcgccgcagccgacggttacccccgaaccgactgcgaagcctaccacagcgccgacggaagcccctactcccgcgccacccatagaacccacggaagcccctactcccgcgcccatagaacccacggaagcgccaacggtttccggtatggcgtggttcaagcagatgacattcacaaaaacgaatgagaccggcggcgaaagcgtacccacgccggagcctgatttcacattgccggacggcccgtttgtcgcacgctttgaagtgcatgaacaggataacgaaaatctgccgcttgtaaagggctggcagatggacggcgataagatttccgcgggcttctttaatgaagttatcagcgagccggatgacattcaaatgccggatctctccaacgccgatccgggcatcagctacgataccggaggctccatgtatacggcggaagaattgcagcagatgatcgccgataaaaagcagcagattcaagatttaaagctgaatgtgaaacaggcggcgcatgaccttgaaaaagcgaagctggatcttgaaaacgctacaataaaatcgaccgtgaacggcgttgtgaagtcgctcacagacctcgatacggcgatgtccacaagctccccgttcctcgtggtttcgggcggcgacggtttctatataacggcatccttaaacgagtcgctgctcggcaaggtgcatgtcggcgacacggtcatggcgagctcttgggagaacggacaaatgtatgaggcagagattgtacagatctccgattttccgaatgacaattccaattattactatgacggctcctcaaacccaaacagctccacgtaccagtttacagcgcgcattgccgatgcggacggcctgaaaaacggcatgggccttgatattactttgaaggcggcctcggataacgcaagcaatgcaatatatctttttaaagcgtatatccgcagcgatgacggcggcaagtatgttttgaaggtcggcgacgataaccgtgtgcataaaacgtatatcaaaaccggcaagacgatctacaaccagtatctggaaatcaagagcgatgctttgacggaagaagattatgtggctttcccctacggcacttcggcaattgatggtgccaaggcgaacggcacggaagaaaacacagacgaaaatgacggcatcgacgcaagggggcttgacgcatgattgaaaatatcagactttcatttcagggtatctggtcgcacaaaatgcgctcgttcctgacgatgctcggcatcatcatcggtatcgcctctatcatctccatcgtgtccaccatcaagggcacgaatgagcaaatcaaaaagaacctcatcggctccggcacaaacacggtgcagattcagctgtatcagggcgattatcagtacgaaatgctgtataacggcttaccggacggcattcctgtgcgtgacgagaccacgatggaaaaaatcaagtccgtaaaaaacgtggaagatgcggcgttttataccagccgcagcgactacaacaactccgtttactacggcaacaacggcatttccggctcgcaggtcttcggcgtggataacagttatttcacgacgaatgggttggtgctgaaaagcggtcgcacctttgtggacagtgattttacggatttccatgcggcagccatcatcgatgccgatacggcggattcgctgtttgacggcgaaaaccccatcggaaaaacgatcgagatcagcggcattccgtttacggtggttggcgttgtggatgaagacagcaagtttgagcccgtcatcaactccatcgatgagtattatacgtattactcgaatagctctgcctcccgtattttcgtgccaagctccatgtggccggcgctctattcgttcgatgagccgcagaacgtggccattcgcgtttccaatacggaagccatgacggatgccggcaaggctgtggcggagatcatgaacacgaacgtgacgaacagcgagatcaagtatcaggcacaggatcttttaaagcaggcgcaggacttgcaggatctcagcagctccacaaattcgcagctcatctggattgcgagcatctccctgctcgtcggcggtatcggcgttatgaacatcatgctcgtttccgttacggaacgtacgcgagagatcggtctgaaaaaagccatcggcgcgaaaaagagccgcattctgtggcagttcttaacggaagccgctgtgctgacaagccttggcggcattgtgggcgtgggtgccggtatcggacttgcggcaatcatatcgcgcgtgacatctgctccggttgccatcagcgtgccttccatcattattgccgtggtgttttccatggtcatcggcatcatcttcgggcttctcccctccttcaaggcggcaaacctgaacccgatcgatgctttgcgacatgaataaaaactaaagatttataaaaatgcccgccgggctttccgatcacatcggtcagcccggcgggcatttttgtgttttgaattactctgatttgtcctgctctgcggcctgaagaaatacttcgtgccatgcgggaaaatgcttctgcatacggatcggctttaacgcgggtgttgtgaagcagtgctgcgaagtgccggtgcaactcaaaagcccggtctccttgctgtgcccctcatacgccatttcaaagcgtacaccgttgtagttttgaatgcgcagtgtaagcacaagcgtctcatcaaagcgaattgggtgcttgtagctgcacgaaacacccagcacggggatcagaatgccgttatcttccatttttttgtacggcaatcccatagcgcgtagcatctccaaacgggcttcctcaaaccaacgaatgtaattcgagtggtgcacgatgcccatttggtcggtctcgtagtaattcgctttgcgttcaaaggtgaacatggcgcggcctcacaggtgcatttcgatgaggtttgcgtaaaaagccttatcgtgtgcgccgacttcggtgtggatgggtgcgccgtctttaaagaggatgacggtcgggatgctggagatgccgtattcggcggcgatttcctgcgcttcgtcaacgtcgatcttcgcgacgacggccttgccctcgtattcttctgcaacttcctcaatgaacggtgcgatcattttgcacgggccgcaccatgttgcaaaaaagtctacaagaacaagcttgttatcgcggatcaatgcgtcgaaattttcagctgtgggatgtacgattgccatggaaacttcctccttaaaatgatttggaattatactaaatttgtttaagagatttattcgtagggtacgatttctgcggagagaatggtgacgtcttcaagcggcttatcgttcgagtcggtctcaacgcccatgatgctgtgcaccacgtccatgccgtcaaatacctgtgcgaacacggtgtgtccggtacctgcggtggaatatgcaccgtcaaggtgtgtgttgccgccgtttgtatcgtaaagttctttgtaggcatccgttactttgtccatatcgagcgtgccgccgtacatggaggtgaactgttccggtgcagatttatagacctgataatactggtcgtaggtatcccagtctattttgcccggttccgtgcagtttataaaaaactgactgccgtttgtgttggcaccgctgtttgcacaagagaccgcgccggtgatgttgacgaggttttcgtgaaattcgtcgtcataattctcgccccaaatgctctcgccgccggttccgttgccaagcgggtcaccaccctgaatcatgaaatcatcaatgacgcggtggaaagtgacgccgtcatagtagccggaaagcgccagagatttaaagctgtacacggctttcggtgcggcatccgggaaaaagcgcatgcgaacggtgccgtagttcgttgtcagcacacaaatctcctcgcctttttccggcatatcgagctgatagccgagcttttctttgtcggcctttgccaagggctttaaggtatctgccgcaacaactttatccgtagtgccgatgaccttttctgcggcagaagaggtgctgccggagcaagctgtgagcagcatgattacggtcaacgccgcacacagcagtttcattttcttcattttttctgtttcctttcttttgcaaagacatactttgcatctgtatatctattttaatatacacggtaaaaacatgcaagcccttttgtttatcttcatgaaaagttcagaaacgcataaatgaaagtttagattcatatacttcggcgtagttaaggcgcagccgaaagcgtttttgcgcggcacggccttaaaaaggagtgaagtacatgaaattttacccggaaggtcatttgatcgacaaagcggaaaacaaagccagtatgcagacgcctgccgccctctccgacgcaatgcgcgacggaaagatcttagaggcgcgcagtatcatctgcgacaacgagcacaacctcattgtagatctcaaatgtatgcggggcattatcccgcgcgaagagggcgcgctcggcatacgcgagggcaccgtgcgggacatcgccatcatttcacgtgtgaataagcccgtgtgctttatcatcacagattttattcgtgatgcgttcggcaggatcacagcggtgttgtcacgtcgaaaagcacaggagcgctgcatggcagagtacatagcggggcttacttgcggcgatgtgatcccggtgcgcatcacgcatttggagccgttcggtgcgtttgcggatatcggctgcggtattgtttccctactgcccatcgatgccatttctgtttcgcgcatcgaccacccgaaggagcggttcacggtcggcatggatattcgcgccgtggtgcgcatgaaggacgagaaccgcatcacgctcagccaccgcgagctgctcggcacgtggacggaaaacgcggagcgctttcgtgtcggcgaaacggtcgcaggtatcgtgcgcagcgtggaaagctacggcatttttgtggagctgaccccaaaccttgcaggacttgccgagctgaaagaaaacgtccatgccggacagcaggccagcgtgttcatcaaaagtattctgccgaaccgcatgaaggtgaagctcgtgcttgtggaatgctttgattacacctataaacccgagccgcctgtatatttctttcagggcgaccatattgataagttcacgtattctccgcccgagtgcgcaaagcacattgagacggtgtttgcgtgatttaggacagcaaaaggcggtctgcacggatatttttctacccggcagaccgcctttctatgtgcctttaaaggacatttgccttaacgggtgtgattactttgcttcgctttcgctcgacttttcgtcgccgctcttctttgccttgtcttcaatgacgtacttaccgtctttgaagtcgcagacatacgagccgcccgctttcatgttgccctcgagcatctcttcggaaatcgggtcttccatcttgctgcggatcgctctgcgcagcggtcttgcaccgtaaaccgggtcaaaaccggcgtttgcaacagcttccacagcagccggggtgaactcgaccgcgatgtccatgtcgcgcagctgacccttaagaccctcgagcattttgccggcgattttctggatgtcgtcgtgcaggagcttacggaacacaataatgtcatcgacacggttgatgaattccggacggaacaccttcttcagctcacccatgacgagctcttttgtgcgctcgaaatcggcgactgcgctgtcttcttctgtcgacttgttgtccgcggtggcaaagccgagacgctcttgctgcttctctgtaatgagacgcgcgccgatgttggaggtcatgatgatgatggtgttcttgaagctgaccaccttgccctgcgaatccgtcagacggccgtcatcgagaatttgcagcagcatgttgaagacatccgggtgtgccttttcgatctcatcaaacagcacaacagaatacggcttgcggcgcactgcctcggtcagctgaccgccctcatcaaagcctacatatcccggaggcgaaccgacgagacgagacaccgtgtgcttctccatgtactccgacatatcgagacggatcatggccttttcgtcaccgaacatggcctccgcaagcgccttgcacagctcggtcttgcctacgccggtcgggccgaggaaaatgaacgagccgatggggcgattcttatctttcaggccgactctgccgcggcggatggcctttgcaatggctgtgacggcttcatcctgaccgatgacacgcttgtgcagcgtatcttcaagatgcaacaggcgttcgctttcttcctgcgtcagctgtacgaccgggatgccggtccacatggcgacgatctcggcgatgtcttctgccttcacgacgctgttgctgcgctcattctttgcagcccactcgttctttttctgctccagctcatctgtaagggctttctgcttgtcacgcaactcggccgcgcgctcgaagtcctgctcgttgacggcagccgccttatcaatctcgacttccttgatgcgcttttccatctcctgcaggtcttccggcgcagtgaatgttctgaggcgcacacgggacgccgcttcatcgacgaggtcgatggccttatccggcaggtaacggtctgcaatgtagcgcgaggagagcttaacggcgctctcaatggcttcatcggtaatctgtactttatggtgcgcctcgtagcgatctttcagaccttcaaggatttgcaccgcttcttcttcggtcggctcaccgacatgtaccggctggaaacgacgctccaacgcggcgtctttttcaatgtactttctgtactcgttgatggtcgtcgcaccgatgacctggaagtcaccgcgcgccagagccggctttaagatattggcggcatcggcagagccctctgcggagcctgcaccaatgatggtgtgcagctcatcgatgaacaaaatgacgttgccgtccttcttcacttcgtcgatggcggacttgatacgctcttcaaaatcgccacggtacttagagcctgcgaccataccggtaagatcaagagccaccagacgcttgcctttcagcagctccggcacctcgccttcatgaatcttcagcgccaagccttccgcaacggcggtcttgccgacgcccggttcaccgatgagcaccggattattcttcgtacgacgagacaagatctgaatgacacgttcaatttcgttatgacggccgatgaccgggtcaatcttgccttcggctgcgagctttgtcaggtcgcggccaaacttttcaagtgcactgccgccttccttttcgccgttttcgtccttcgggtacgcattgccggaagctttatccacggtataaccgtcggaaagcgccgaggacaacgcatttgcaacgctctgcgggtcaacgccgagcatttgcaggaaacgcaccgcaaagctttcaccgtcttcaatgatggcgatgagcaggtgctccgtgccgacatagttactgccgagcttggaggccgcgagctttgccatctgcaaaatgcgctttgtgcgcggggtgaaatatgcggtggtgaggttcgtcggcgaagaagtgccaatcttctcctgcatcaggcgttcgtaatcgtctgccgtgatgccgagcttattcagcacgttgaacgcaacgccgctgccctctgcaatcaagccgtagagcacgtgctcactgccgatgtaattgtggccaagttcctccgccttttcgatggcgcggttcatggcattgtttgctttctctgtaaaacctgtgaatctatacatataaattcccgtcctttcgatcactgccatatcgcagttctctttactgattttctattattgaagcgctttgagggctttgcgcacctcgtctgcgcggagaatgtctctttgccccgccgaaaggttgctgccgtgtgcggctgccatggtggccggctgtaccgctacggtcagtgtgtgaatatcttcaagcgttataccgcttaaaagcttttctgcaatgccgaaacgcacattggagataagcttcatatattcatcgcaggaaagcagccgtgcgtttttcagcacgccggcggagcggcctactttgtcctgcacattgatgttcttgctgagcgaagcacgcgttttgcgctcttcggaaatgagctgcatcgtaatgttctgcaagttttccacagcctctttttcgctgagacccagtgtaatctggtttgaaagctgatacatggcgccgatgacattgctgccttctccgtatgtaccgcggatcacaaggccgagcttcgaaagattcgtggagattctggacattgcgccgttttcggtgagcgccggcagatgcagcatcacagaggcccgcatgccggtgccgaggttcgtcgggcactgggtgaggtagccgagctcggaatcaaacgcaaaacgcagcgattcgtttaaaagcgtatcgatgcggtctgccatttcggcagcttcgctgagcgcaagaccctcatgcagcacttggatacgcacgtggtcttcttcgttcaccataatggagatgcgctcgtcctttgagatgaggaatccgcgtccctttgcgtttgcgatgaactccgggctgacgatgtggcgttccacaagtgacaccgcctgctcgttgctgaggtcatccatctgcacgaagtcgaaatccgatgcgatggcgctgttgccgctgaggatcgcatcgcgtacgcggcgctctacggctgctttctggtcaggcgtcatgcggtttgggaacggcatatctgcaaggtttctcgccagacgcacacgcgtgctgatgacaacgtcactttctttacctgctttttcataccatttcttttcttcgttaagcatggttcccatctcctttctccatttctttgatttcgtcacgcagctcagctgcgtgctcgaagtcctgcttttcgattgcttttttcagttccgcacgtttcttttcaatcggcgtgggttcttccacaacggcaatcttacctgccggttccacaatgcgcagcgcattgcttccgggtactttgcccttgtgctttgctgcaccgtggatgcggtggatagtcggcatcaggcggtcacggaacacattgtaacactctgcgcagccgatcttgccgctttctgcaatctcctcaaaggaagcaccacatttcgggcagcgcaccgcattactgcgcccggtcggcgcaccgatgaagctgccgagcagattgttgaaatcaaagtccatatcatcaaagttaaaaaagctcttgtagccttttgcccttgcacattccgagcaaaggtcatattccgccaacttgccgttgacgatggttttaatgtgggtcgttgccggattctttccgcagttctgacacatcataagtcatcccgtcctttcaaaatggctttttatgcatttagtacgagcaacatgtttttgaagatcgatgcccgcagttgatctcgaatttcttttggcgccggtgcaagtgccgaatccgaaagccctgccatcatcaggtgagcgtcggattcggacgcaacgcccgtttccacaagattccgcagcatggcgcgcatagaagctgcgtccagcttaggcccgatggaattgacaatgtgcatgattaaatcggattttgtcatgctccggcgaataatgcgaatgtaaccgccgccgcctcgcctgctctctacgatatatccctgctccggtgtgaaacgggacgtgatgacgtagttgatttggctcggtacgcagcccagcgtgtttgcaagctcattacgctggatctccgcgatgccgttttcatcattgagcatttgtaagatgtaattcgcaacgctgtcgctgattcgcatttctgatcgcctcttgtcctttctttgtctttgactttctttgactttaattataagcaaaacggatatattgtcaagcgtgattttatacgattttccgcaattacattaaataatctctctatttcaaattatttctcaataatactaactgaaacgcatggatttaaaaagtttttgaagttttgctttgaccatcacacattttccccactttcatattctgtactgtaaacgaaaggaggcgttcaatcatgtgtaacggttttggcggaggttgctcttggatcatcattatcatactgatcctcttgtgctgcggcggctgtggctgcggtaacgattgcggctgcaacaactgtggtggctgcaacaacggctgcggcggctgtggctgctgatcggtcgatcgcataatataaaagcaagccgactgagtgaaagcagtcggcttgccgttttataaataacacgtaaagtgacaagactttacatattgccgatcatataaagaaaagctgtgcactccattagaatgcacagcttaattttaggactatgaaaagcaatttagctttacagacagctcggaactttgtagccgtatgtattcttcttatagttgccgttagagggcgaggcctcggcgtagttgccgtaggagaataccttagcttctgcaaggcgtctgtaatacaggccgatgtagcagttgccgcctgccacatgccaatccagcagattgctgccgaatgtgtaggcgtccacatagttcaggtcatgcgtgagaccggaggtgctgttgaaagcaacatcgcctgcgcgcacccaaccgctcttaccgcttgcagagaccttgtaccagctctgcttcgtgcttgagtcgcggtaataatcgaggatgttcacacttgtgttgatcttaagcgtagtaatctgcgtggaagaagcgctgtggtcctgatacatgggcagtgtggaagccgttaccttaccgccgtatggattggaagaagacagatcctgcggcggaacaacggcgttcatgatgactgtacgcacgtagcagttgccggagccgttccagtagcctgcgccgacattgtaagagaagcttgcaagcgcatcaaactggcactggctcatcaaaaggccgttgctcgagatgaaacggttgatctctgtggtgtaagagccgcggttgacggtatcggccagcatggcctttgcttccgagcgggtcaggttattgtagaatgtggtgttcttggaaacaacgtaaccgtagccgacggtcgggatattgccggcaagcgtgtccggcgaaacctgtgggacatagccttcataagaggcgatgttgtcgagcatactgtcacttacgcggcggctctcgcctgttgtcgtatcggaatccgttgtagagacgacgaggatggtgaactctctgtaatcggaggaataaccgccgccggaagacgaatacgcacgcaccgtgtaggtgccaggtgtactgattgtagccgaagcagagaaaatacggacgttgttgtcgccctgactttcggaatcgtaggacgtggtatcgtaggtgccgacgccatcaatctcaaagcgcacggcggatttctgcgtatccgtaaccgccttcaaattgaaggatgcaccggctgtgataatattcggtgttgtgtacgcaaagcggacagcttccggcgcggagaccgtgacggaaacggtggcaagtgcagtgccgtttgcgctctttgcggtgatcttggccgtgcccggcgcagcgccgtaaatgaagagctgaccggaaacaccggcttttgccgttgcaacggaagcatcactgctctcccacgtaacagagccggaagcagaagcctgaatgtagatggtcttatactgtgcgagatcgacggaagaaacggagaccgatgcgctggacgaagacgggtcatatgctgtgacatattctgccgagacatagccctctgcgccgccggtcgtacgcacatgcacccagccgctcgttttgcggtcaagcacgttcagcacggtgccggtgctcaaaacggtgagtactttacagctcgtgttcggctcggaacgcaggttgaggccgaccgtaacgcggacgtattcgcctgttgcgggtgcattggagttattgccgttattggtgttatcatctccactgttaccgggctttacggagttgatatcgccggaggtgatcttcaagtactgcgcggcaaggtagccctctgtgccgtcggaaagcttcactttgtaccagctgctgtttgtggcttccgtaacggtaacggtaacgttcatatcgataaccttgatgatgccatagcttgtgccggggcctttgcgcacatttaaatcggatgtggtcttggcctgtacggttccgttgctcggcgccggggtcggcgtgggcgttgcggaaggcttggcagaattaatatcgccggaagtaactttcagatattcggagaacagatagccctctgtgccgtctgaaagctttaccttgtaccactggctgttcgacgcgtccgtgactgtaacggtggtgccggtgccgatgaccttgatgacgccgtaattcgtacctgcaccgcggcgcaggtttacgtctgcggtgagcttagcctgcacagtgccatcattggacggtgcctgcgtaggtgtaggcgttgcggacgacgtgccggtgaccttcaaatactgtgcaaagatgtagcccgtggagccgtttgcaaggcgcacggcataccactgagagttgctcctatctgtgaccgtgacggttgtgccggaagcgataacgcctttagagctgtaattcgtgccggggccggaacggaagtttacgtattccgtcgttttcgcgctttgttcggaaccgctcggtgcctgtgtcggtgcgggcgttgccgttgcggaggaagaactgttcagcttcaaatattgcgcaaatatgtagcccgtagagccgttcgagaggcgcacggcgtaccactcggaattgctcgtgtcggtgaccgtaacagtggtgcctaatgcaatgacgcctttagaactgtaattcgtaccggggccggaacggaagtttacgtattccgtcgttttcgcgctttgctcggaaccgctcggtgcgggcgttgccgttgcggaggaagaactgttcagcttcaaatattgcgcaaatatgtagcccgtagagccgttcgagaggcgcacggcgtaccactcggaattgctcgtgtcggtntcggtgcgggcgttgccgttgcggaggaagaactgttcagcttcaaatattgcgcaaatatgtagcccgtagagccgttcgagaggcgcacggcgtaccactcggaattgctcgtgtcggtgaccgtaacggtagtgcccaatgcaatgacgcctttagaactgtaatttgtaccggggccggaacggaagtttacgtattcggtcgtttttgcgctttgctcggaaccgttggatggcgcctgtgtaggtgctgccgtagcagacggcgtattgctgcccgtgaagctgatgtattcggcgaaaatatagcccgtagagccgttcgagagacgcacggcgtaccactgggcattgctcgtgtcggtgaccgtaacggtggttcctaatgcaatgacgcctttagagttgtaatttgtgcccggtccggagcgaaaattcacatattccgtcgttttggcactgcgttcttccccgttgcttgtgctgccgccggtagacatggaaatatactcggcgtagatataacctgtagagccgttagaaagacgcacggcgtaccactcggaattgctcgtatccgttaccgtgatggtcgtgccggaagcgatgatcccctgcgagctgtaattcgtaccggggccggagcggaagttcacgtattcggttgtttttgcggaaacttcttccgcataggccgcaagcggcagcgcagaagccaatagcagcgcagaaagcaacagagccgtgcccttctttcggagcattctttttctgtattgcatgtgttttcacctatccttatcaaggcatcgacctgtagaagcaaaagccggtttctgtcctgttgcggcagaatatggtacagatcgttttatacagttacaatcataacacaatagttacaaatttgcaaccatttttgcggttcaaaagccaaaaacagaaaataaacccgcgattttcgcttaaaatacttaaatatgaaaaataccggacccataaaaacggatccggtatcgaatttcaggtgaaattacagcttttcaacgatggctttcgtatcgcgtgcaatgacaagttcttcgttggtcgggacgatgtaaacagcgaccttgctgtccggcgcggagattttcttctccttgccgcgaacgcccttgttggcttcgtgatcgaacttgatgccgaggtattccatgttggtgcagatgcgctcgcgcagggtatcctggttctcgccaagacctgcggtgaagacgattgcgtctacgccgttcagcgcagcgacatagctgccgatgaacttctgaatctgataaacgagcatctcatgtgcgaggtgtgcacgctcgtcgccctcgtcctctgccttgcagatgtcgcggtcatcgctggagataccggagataccgagcaggccggacttcttgttgaagaggtcggaaagctgtgccggggtgaggttctctttctctgcgatgaacgtgacaacggacggatcaagcgtgccggtacgggtacccatcatgaagccgtcaagcggggtgagacccatgctggtgtcgatgaccttgccgttcttgatggcggtgatggaggaaccgttgccgatgtggcaggtgataagcttcagatccttgatgtccttgcccatgagctctgcaacgcggtggctgacatagcggtgggaggtgccgtggaagccatagcggcggatcttgtacttctcataatactcatacggcacagcgaacatataagccttctgcggcatggtggaatggaaagccgtatcgaacacgacaacttccgggacttccttgccgaaaacattcatgcaggcacgaatgccctgtacatgtgcgctgttgtgcagcggtgcaagcgggatgaggctttcgatgccctcgatgaccttttcgtcaacgagaacggattcgctgaagagcgcgcctccctgaacgatacggtggccgatagcagcgacttcgctcagatccttaatgacgccgacttcactgtcgagaagtgcgttcttgacctgctcgaacgcttcggtgtggttcgccatgcggatttcgatcttcttctctctgccgtctgccgtcttgtggccgaaaatgcccatttcaaggccaatcttctcgcagttgccctttgcaagcatttgctcgttgtccatatcgatcagctgatacttaagtgaggagctgccggcgttgatgaccagaattttcatttcgtcttccccctgaatcatggttaaatttgaattggatcatctgtgcaaacgcacaaaaaataagcacgacacttccaaaattataaataaggaaacgcggcttgtaaattgatcttcattgctttatacttatgataatacaaaatcatgtaaatttcaaggagtttcctataaaatgattggaaaaaacaagatttcgggcgttgtttgcgagtttaatccgctgcataacggccacgcggcactgctctcccgcatttcggaggagttcggcagcgacattgtctgtgtgatgagcggaaattttgtgcagcgcggcgaggcggctgtgctcgataagtggtcgcgcacacggctggcactgcaaaacggcgcggcactcgtgctggagctgcccttgccgtgggctgtggcaggcgcagaaaaatttgcactcggcggcatttcgctattaaatgcgcttggttgcgtagatacgctgacgtttggcagcgaaaccggcgataccgcgcccctcatacactgcgcggaatacttgcactccgatgtgtttaattcggatattcgcccggaggttgcaaaaggcgtttcgtttgcggcggcgcgtacggaggctgtgaaaaaggcactcggcgcagaaaccgcagagctgctcacaaagccaaattgcattttgggtatagagtattgcaaagcgatcttatcgttgaattctaatatcgtgccgcagactgtgcagcgtatcgcgattgaccacgacagcgacaaagcgcacggcgcgtttgcatcggcgagcctgatccgcagcaagagcgccgagggtgaagagatttcctcgtatgtcccggaaaatacggcggtgtgtattcgtgcgctgcaaaaggaaaagcagtaccccgcttccctttcgtatctcgaccgtgcggtactggcggcggtctctgccatgtcacccgaagacctgcgccgcgtgccggatgtttcagagggcattgaaaaccgcattttggcggctgccgaaacggcggaaacgtgcacagggctgtttgatgcggtgaaaaccaagcggtacagtcacgcgcgcattcggcgtattgttttaagcgcgtatttgggcatcacgaacgatctgcccaatttgcctccgtacctgcgcattttaggtatgacaagccgtggcgcggagatcctgcacaaagcgaagctgatgctgccgatcatcgcacgacctgcggacgtgaagaagctttcgccggaagccagacgtgtgtttgagttggaagtgcgcgcggataatctttacagcctgtgcacagagcatcgccgccctgcgaacatggattatacagaaaaactgattcggatataaacggagctctgcatttggcttttgccggtcacagagctcttcttttatacaaaaaggccgaaccacgcgggctcggccttttgaatgttcaaatattcgaattacttctcaagcggtgtgacttccacagtccaaccgagggtatcttctaccttgccggtctggatgccggtgacggtgtcgtacagcttctggctgaattcgccgatgccgccgtccttgatctgcatgacttcgttctcgtaacggagtgcgccgaccggagagataacggctgcggtaccgctaccccagcactcttcaagtgcaccggtacgggccgcctcaacgagctcgtcaacggagattcttctctcctcgaccgggagaccccagtgcttgcagagatcaatgcaggatgcacgggtaacgcccggcaaaatactgccgttcagcatcggagtgacaacggtgccgttgattttgaagaagatgttcatagcaccgacttcttcgatgtacttgcgctcaacaccgtcgagccacagaacctgagagtaaccttcgtcgtgtgcctttacctgtgccgcgaggcttgcaacgtagttgccgccggtctttgcttcgccgatgccgccgcggactgcacgtacatagtcgtcttcgatccaaatctttaccgggtctaggccgctctcatagtaagcgccgaccggggaaagaatgatgatgaatttataggtgtccgacgggcgtacgccgaggaacggatccgttgcaatgacgaacggacgaatataaagagaagtgccgggacggctcggaatccaatctgcgtcaacggcgacgagcgtcttgatcgcattgaggaaatcatcggccgggatctccgggatgcaaagtcttctgttggagttgtttgcacgctcgatgttcttgttcgggcggaacagacggatgcggccgtctgcgcatttataagccttcatgccctcgaacatttcctgaccgtagtggaaaaccatagcggacggatcaaggacgatcggctgatacggcatgatcttcggatcgtgccaaccctgctccgggttatattccatcacatacatgtgatctgtaaagattttaccgaaaccgagcttgctttcgtctgccggcttcgctttaggcgcagtggtacgctcaatctggattttctgcatcaaaaaacacttctttcctgtttgcttatacacattttagcacgtatttgccttttttgcaagttgccgaggtttaaattgcaaaaaaagcttcacaaataaccgtttggctttgcgaagctttctgttctttttgtataaacgaatgcacctttacaggtgtgtgcgcagcccctttgggtaacgattcttcaaaacaccgtttgatgccttgccaaagcccgttacaataccgtctgcggcgacggcggtgtaaccggaaagcccctctgcggggatttcttcgccgcgcaaaaacgcgaataaagcaggatcgttcgatgtgagatgcagcacgctgcagcagttttccgcacggctcgccatgaaaatgccatgcgcgggctcgatgcggttcttttttgcctcgccgaattccacaccggcgcgcagaacggaaagtcctgcaatgtccggcagctcatttggcaataagatcacacggtcgcgcacgcgctggaatcttcccggtgcatcggtaaacagagatgtgtacaattcttcggcatgcgcctgcgtctctcggtcgggtttaaagctaaacggcgcaaagcgttcttcacaaggcgcaacgcgtcggaagcgtgcggcaaagtgcccctcacccccgtccatcgggaaaatgcgcacagcgtctacgccataggccgagcgaccaaatgtgacattcggcttttcgagcacgaattccgggtggctttcgagaaatttctgcacaacgccctcattttcttccgtggagaatgtacaggtagagtacaccaaaatgccgccttcgcgcacgcactgtgcggcggaggataaaattgcgagctgacgtacagcgcaggtctccacgtgctcaggactccattcctgcacggcaacgggatcgcggcggaacatgccttcgccggagcacggcgcatcaacgagcactttatcaaaatacccgccgagcttttccgcaagcatctccgggtatacgctggaaacgactgtattacgcacgcccatgcgctccaaattggaggatagaattgcggcgcgattgcgcacaacttcgtttgaccacaaaagcccggtgtcgccggtcagcgcggcaatctgcgtggatttaccgcccggtgcggcgcagaggtcgagcaccttatcccccggttccggcgccaaaagcgtgacggccgaagacgcggacggctcctgcgaataaaacgcgcctgcatgatagagcggcagcgtcgccattttggtatttgtcggcgcataaaacgagagcggcgaaaacggcgtttgcaccagtgtaaacggcagtgcgcgttcaagctgctcttttgtgcattttacagtgttcaaacgaatgccgcgtttgtgcggttcgttgtaagacgctcgaaacgccgtatattctgccccaagcatatcctgcattcgtttttcaaaagctgcgggcaattccatggccgccccacctttcctaatttcataaattcggtacataaacgcgcgtaccgtgcgcataatagctttcggaaggggtgaatcacatggcaaattccgaaaacaagaattacacaaacaaaaaccagaaacaaagccgcaataagagcgatcgtcagacaaccgaccgcgtgaataacggcacggaaaatcgtacggaaaaccgcagtgaaaaaagctgccggtaacacaaaaaaccggaaaaagcaggcaggcgatgcgcttgtctgctttttctatgcggatttattctttcggctcactgaccggcttatcgcccgtcttgcgaatagctttgataatctcgccgagcgtgcggtcgtcggagcgcacgggtttgaagccctcaccggcgatttcaccggcatcgccgacgatgacgaacgcatcggggtcttcctcgcggatgatctcactgatgcggaacacttcaaagcggcgcacagcgcagaagagcacctcgccgtcctgcttcaaatagccgctgcgggacttgagaaacgtcaggccgcggtccatctccttaatgatgcggtcggcaatgacatcgtttttatgggacataatgaagaacattttgccgttgcccgcatctgtgccgtacagaattgtatcgatgatttttgtcgatacaaaaatgacgatgcacgcgtacacggcgctttcaatgctcttatatacgatggcggaaaacagcacgacgcagccgtctacggcaagcatcagcttgcccatggaaagatggcgcaggcgatgattgagcagacgcgcgatcatgtccgtgccgccggtcgtggcaccgcgcataaagacgagtgaaagaccaacgccctcacacacgccgccgatgagtgtgatgatgagtgggtcaccgtggtaaaccggcatgaacagcgccacgatgtcgatgcaggcagcgtttaacacgaccgccaacatcgttttggtgacgagcttatagccgatctcaatgatcgcccaaatgatgatcggcacgttaataagcaaaatcacggtgccgacgggcgtgccgaacagataattcagcacgatggcgataccgctcacgccgcccggcgcgatgttgttcggcgcggtaaagccgttcaggccgaccgcgtaaataacggaacccgccgtcatgaaaatcaggtcaagcagaaattccttcacgttttttgcaactttatttttgcgcatgtgcggtttcctccgtttctgcgaattcaaggatcttatcgaagaaaagacgcaggcgctccagctcgtctttaaggtaaagatagccgaaaacgcattcaaatgctgtggctgcgtggtaatccgcaacgctggagtttttcggcacgtgcgaaacgtgcgcattgcgcccgcgcagacagacttctttttcctcttccgtgaaaagcggcatcagcacttcactaagcaccttcgcctgaaactcgcaacgcacgaacgaaacggcgcggctgtgcagctttttcacggggcagttgcctttggagacgatatattcgcgcacgaaaagctcgtacacgccgtcacccacataagcgagcgttaaggggcttaactgcttcggatccgattccgtttgatagaacttttccaaatagccaccctcttagtttacaaaatcaaattcaaggtcatacatgctgaccgtgtcgccttcctggatgcccgcctcacgtaacgcatcgataacgccggtgtgaatgagcacacgctggaagtactggagcgactcgtaatcatcgaaatcgacggcggagatgagctttaagagccaatcggcctcgacaaaatacacgttgtcctccacgcggatatcgacctttgccttgctgctgaattcttcgacaggctttaccggctccggttcaggttcgaaatgcgcgaccggcggcagcgtggaaagcatttctgcagttttattcaaaagcgggtcaacatcatagcggattgccgccatgattggaaagaattcatagccttgctcctcgacaaacttgcggaaatcctctacctgctcgtcggtcgtcaggtcacatttgttgccggcgaccagcatgggacggttcgcgaggtcggggttgaacttgcgcagttcctcgttgatgatgcggaagtcctccttcgggtctctgccctcgctgccggaaacatcgacaatgtgaatgagcatgcggcaacgctctacatggcgcagaaactgatgaccgaggcctacaccctgccatgcgccctcgataaggccgggaatatccgccatgacaaacgatggtgcgttcggcatatgcactacgccgagcaccggggtgatggtcgtaaagtggtagtttgcaatgttcggctttgcttcgctcacaacggaaacaagcgtagatttacctacgtttgggaagcccacaaggcccacatcggcgagcagcttgagctcaagctgaagctcgaatgcttcaccaggtgtgccgggttttgcaaagcgcggagtctggcgcgtaggcgacgcaaaatgcgtgttgccccagccaccgcggccgcccttcgcgataacgacgtcttcgtctgtggacatgtccgccatgatgcggccggtttccgcgttgcggatcagtgtgccgcgcggcacggtaatgacgagcggctgtgcgcttttgccgaagcagcgcttgccgcgaccgttttcgccgcgctctgcggtgtacttgcgcttgtagcggaaatccgccagcgtggagaggttatcgtccacgcggaacacgatgtcgccgccgcgaccgccgtcgccgccgtccgggccgccggaagccacgtatttttcacggtgaaaagccacggcgccgtcgccgccgtcaccggcttttaccttgatcttagctatatcgataaacataattcatcatcctttcagcgccgcggacggctctgtacaaaataaaatgggcttctccgctttacccgaagaagcccgtttcatcgtatattcggggatacgaaaccggtattccccccaagggtcaaaattactgctcgatcgagtaaacgctgaccttcttgcggtcacggcccatacgctcgaaacgaacctgaccgtcaatgagcgcgaacagagagtcatcagagcctctgcctacgttctcacccggatggatgtgcgtgccgcgctgcttaacaagaatgttgcctgcgaggacgtgctgaccatctgcacgcttgacaccgagtcttttggattcggaatcacggccgttcttcgtggagcccataccttttttatgagcaaacaactggatattgatcttaagcattttgttgccttcctttcgttttattgtcagacttctgcgtagcgtacctgtaagttttcggggtactgctcctctaaaccgagaagatgcagcttaaatccctcaaacaggctacggcatgtccgtgcatcggtatcggaaaccctaaacagcatctcgccgtcctctgctcggagagaaatcggtgtgatgtgtaaaatctccagcacggtgttcgccgtcatatacgctgcagaagaaaccgcagcacagagaatgtcttctcccttctgcgccaaaccggaatggccaagcacggaaaaaccgagaagcgctccgtctgcatttgcgaaaaaatccgcacgaatcatacgatcaaattagccctgaacggactcaatctgaatcttcgtgtagggctgtctgtggcccatcttgcgcttttcgcctttcttcggcttgtaagtgaggatcgtaaccttcttagccttgccgttcttcaggaccttgcctgtaacggaagcgccctcaacatacggggtgccgatttttgttccgtcttcgccgcaaattgcaacgaccgggaacgtaactgtctcgtcttcattggcagcgagcttctcaacgtagatcacgtcgccgtactgtaccttgtactgcttaccgccggtttcaataactgcaaacattttttctgcctgccttttctgtaatctcgctactcgtaggcggactttcgtcacttttcagcccacagtaagcggctctatcatattaacatacactgaccctaaagtcaaggtatttcaaagggattttgtggttttttcttcaagcagcaacgcaagcttgtcgtcctgctttaccgctttgatgacgctcttgcggtctgcgatgcgcacgatcaaagcgaggagaagattcaaaaaggtcaggaacgccagaaacaggcggtcacggcgcttttgacgcttcagtttctccgggtcgcgacggcctgcaccgttacgctgtgccttactcatggctcttatacgcctgttcacagtacaggcaacgatagcggtgcgctttttcatcgcacagcacgaagatttggtcgaggttttcctccgtgcttgtgatgcagcgcgggttcttgcactttacaacatttttgatgcgacgtggcagcacgatgttctctttcttcacaagctcaccgtttttaatggtgcatacggtgatgttgttatcgataaagccgagcacatcgaagttgatagcgaggtcgccttcaatcttgatgatatcttttctgcccatcttgctgctgcgggcatttttgataagtgccacgcagcaatcgagcttatcgagctccaaaagctcgtagatgcgcataccctttcctgcctgaatatggtcgatcacaatgccgttttggatactgtcgatgttcagcatacggtttcctcctcaaaaagtcccggttcaatgttcagaagcattaaaatgagcgccatgcggacatatacgctgttttgtgcctgcacaaagtactttgcgcgcgggtcatcgtccacttcgaccgcgatctcgttgatacgcggcagcggatgcagcacaatgagatccttcggcgcaagcttcatcttctctgcatcgaggatgaagctgtcttttaagcggatgtaatcttcttcgttgaagaagcgctcgcgctgtacgcgggtcatgtagagtacgtcaagctccggcagaacctcgtccatggtacggacttctttatattcgcagccggagggctttacgacttcatcgatgatatagctcggcacatgcagctcttccggggagatgaacacgaagcggatgccctcccagcgcacaagcgacttgatgagcgagtgcacggtgcggccaaatttcaagtcgccgcacagaccgatcgtcaggttattcagtctgcccttttcgcggcggatggtgagcaggtcgctgagcgtctgcgtcggatgctggtggccgccgtcaccggcgttgatgaccggcacgcgggcgtactgcgctgctacgcgcggcgcaccctctttgttgtggcgcatggcgatgatatccgaatagcaggataccatgcgtaccgtatcggcaacgctttcacccttggaagcagagctgttctgtgcacttgcaaagcccaataccttgccgccaaggcgcatcatggccgattcaaagctcagacgcgtgcgggtactcggctcgtaaaagagcgtggcaaggatcttaccttcacacttgtgggcgaatgcggtgcggtcgtttgcaatgctgtccgcaaggtccagcagacgcagggtctcctcaaaggaaagatccagcgggtctacgaggtgtcttaactcattcatcttatctatgccttcctttcttatgtgcgccgtgtgttgtgttttatacgtggcgcaagtaaaaacaggctgtaaaaaacctccccggtaagcccagagaggttttcagcatcaatcttcgtcttcttcctcgggctcgttccagttgtgccagacttgctggacatcgtcgttatcctcgagtgcatcaatcagcttctgcatcttgagaatctgatcgggatcggtgagatccgtgtaggtatccgggaccatttccacttctgcggaaacaaaggaatagcccttagcttccagatcatcgcgaacgccactgaaatcggacggctcagtgtagatctcgaatacgtcttcgtctgcctgaaaatcggaagcaccggcctccagtgcatcgctcatgacggtatcttcgtcaaggccctcacgctccagcacgataactcccttttcgttgaacatgaaggaaacgcaaccggtggtgccgaggttgccgccgaacttgtcaaagtaatgacggacatcgcccgcggtacggttgcggttatcggtgaggcattccacgatgacggcaacgcctgcggggccgtagccttcgtaggtgatgctttcatatgcgttggagttgccctcgcctgcagctttcttaatgatgcgctcaatgttgtcgttcggcacattgttcgccttagccttcgcaatgacgtccttcagcttggagtttgctgccgggtctgcgctgccgccttctttaacggcaacggcaagctcacggccgatctttgtgaagatcttcgctcttgcaccgtcggtcttttctttctttctcttaatattattccacttggaatgtcctgacattgatgaaaacctgcctttattcacacaaattcaagttattatatcacagctcgcgcgcgatttcaatagcaatttcctgtgccttcgcgaaaatcgcagagttttcgcaatctgcacggtctgtgtccggcaaaaccaccgtttttttgagcgttgtgttcataacggaaaagctttggcgcagtgttttctcgcatacctccaccgcaaacggatcataccgccccatggtgagcagcaaaacggcatcgcggtgtgtcgcaatcgccgggcggataccgcgggcaaatctagcttcaaaataccgctgaaaacggtcgatgaccgccttgagctgcgccggaaacgagaggttatagaccggcgtggcgatgagaagcagatcacacgcgcgtaggtcacgatcgaattcatcgaggtcgcgaaacgcgcagccgtctgctttttggcaatatccgcaggcgatacacggatgaatattcactttgcaaatgtcaagtgattttacttgccagtctttccctttcaatccgtcgagaaaagcttcgagcagcttctttgtgtgtccgtctttatgcggcgaagaaaacaaaacgagtgcatgtttcatgtactggtctccaattccgtgaagtaaaaagcctttgcaaagctatttaacttcacacaaatgtaaaaagagcgctgtgaatttacacacagcgctctgtaaaaagttagccctttacaacaatattgacgagcttgcccggaacgtagatctctttcacgacgttcttgccgctgatctccgctgcaatgcggtcttccgcctttgcaagtgcaatcgcgtcatccttctggatgtcggctgcaacgtacaatcttgtgcgaaccttgccgttgacctgcacaacgatttcaatgacgtcatctttgcacttcgattcgtcgtacttcggccaaatctgctctgtgaccatgccctcgccgagcttcatctcactccaaacctcttctgttacatgcggtgcaaacgggttgaggagcatcgtgaagacggagagctctgctttattgatggaacccttttccgcaataacgttcatgagcgccatcaaagctgcaatggcggtgttgaacttgaggttctcaatgtcataagaaaccttcttgatggctttgtggaaagaattttccatctccgggcggatcgcttcgccgtcgacgagaatggactgcaggttccaataacgctcaatgaagcggcggcagcccttgatgccggcgttgctccacggtgcggccttctcaaagtcgccgatgaacatttcatagagacggagcgtatctgcaccaaactcgttcacaacgtcatccgggttgacaacgttgccgcgggacttactcatcttctcgccgttttcaccgaggatcataccgtggctcgtacgctttgcatacggttctgcggtcgggacctggccaatatcgtagaggaacttatgccagaaacggctgtacagcaggtgcagcgtggtgtgctccatgccgccgttataccagtctacctgatgccagtagttgagcgcttccttggatgcaaaagattcatcgttgtgcggatccatatagcgcaggaagtaccaggaggagcctgcccactgcggcatggtgtccgtttcgcgcatggccttgccgccgcacttcgggcacgtggtgttgacccaatcggtcatcttggagagcggagattcgccgttatcggtcggctcgtaggaatcaacctgcggcagaacgagcggcagctcgctttcatcgatcggcacatagccgcacttctcgcagtgtacaatcggaatcggctcgccccagtagcgctggcgtgcgaacacccagtcacggagcttatagttgaccttacggtggccgatgccggtctcctcaaggtaatctttgatgcggactttcgcttcttcgacggtcatgccgtccagaatgccggagttgaccatgatgccggtgtcgcagtccgtgaacgcttctttctgcacatcgccgcccttaacgacttcgatgatcggcaggtcgaacttctttgcgaactcccagtcacgggtatcgtgtgccggaacagccatgatggcgccggtaccgtaggaaacgagaacgtagtcggaaatgaagatcggaatggtggttccggtcagcggattgatggcctcaacaccctccaaacgcacgccggtcttatctttcgcgacctcggtgcgctcaaagtcggactttttcgcggcctctgcctgatacgcgcggacggcatccagattctgcagcttatccgcccacttttcaatgaacggatgctccggggaaacaaccatgtacgttgcgccgtaaagtgtatccgggcgggtcgtgtaaacagtcagcttatcgcctgcagtcgtgttgaaatcgacctcggcgccctcggaacggccaatccagtttttctgctgggtcttaacgcggtccgggtaatcgacaagatcaaggtcgtcgatgaggcgttgtgcgtaagcggtgatcttcagcatccactgggatttgaccttgtgaataacttcactgccgcagcgctcacagacgccgttgacaacctcttcgtttgccagaacgcatttgcaggaggtgcaccagttgacggacatctcttttttgtaggccaaaccgttcttaaagagctggaggaaaatccactgcgtccacttgtagtatttcggatcaatggtgctgatctcacggctccagtcgaaggagatgccgagagactgaatctgctgcttaaagcgcgcaatattcttctttgtgatctcttccgggtgcacgtggttcttgatggcataattctctgccggtaggccgaatgcgtcccaaccaatcggatagagcacattgtagccctccatgcggcgctttctggaaacaacgtcaagcgcggtgtacggacgcgggtggccgacatgcagaccttgaccggacgggtacgggaactcgatcagagcataatatttcggcttatccgaagtattggaagcatggaaaacaccggcttcttcccacttcttttgccacttcggttcaatttcactgggattgtacttgttcatgttgattacacttacctctctgcgctatataaaataacaaaatcaattcggttcaaacgtcatgttgagcttttcgccgtcgagccacaggcgatccaaatcataaaaactgcgcgcttccgaggtgaagatgtgtacgaccaccgtttcgtaatcgagcacgacccaggaatcggagcgatagccctccacgcggtccggcacaatgccgagctctttcagcttaaactccagctcgtccgccagagcatgcacatgcgtgctgccggtgccgttcgccagaacgaaataatcaccgagcgaggaaacgtccgaaatgcggatcacattgatctgatcggcttttttcgcatccaaaatgcccgctgcggtttttgcaagcgtcaatgaatccatgcttttagccattcctttctgcgcgctgcgcgatttttatgctccttccgcttagttgccatgccgcaaagcccacaccgcgtcattatatgcgtctatggtctccggcacgatgggcgcgcggtcttttgcgagctccgtaatggtgaacgcgatgccctccacaatggctttgtcaaggcttttatacgcggccttgcgcatatcctctacgccggggtaattgcggtctttggagataaaatccgcgataaaaatgactttttcgagtaacgtcatgttttttctgcccgtggtgtggtatcgcacggcattgtaaacatcctcgtcctcaatgtgcagaacatgtttgatatacaccgcgccgctgatggcatgccagaactttttagcggaaagttcaacgtcgctcataattataccaaagtccgcgagaattttcaactgtttctccgggggtgtatccttcaaaatatcgtgcaaaagccctgcaagctccgctttttcggtatcggcaccgtatttttttgcaagctttaccgcttcttccgaaacatttaaggagtgttcgaaacgtttttgcgtgagcatgggcttgatgatatcgatatattgctgtttttctttcttattcatgcgtgtaaagcctcttttttcggatgtattccgcaacgcctgcgggcacaagaccgcttatatcttcgccatgcagacttttttcgcgcaccatcgtcgatgagacaggcaaaaactcgatgttctgcacggtaaagcgaagctgcgggaactttcccttcacttcttccccgtgcgtgacaagcgtttggaagctatccttgtcacgcggtgcggcgcagatctctgccgcggcgaaaatgcgctccgggtgataccacttttcgacagtgcagaacatgtcttcccccatcagcaaaaagagctcatcgtcgggatattgcgctttcagttccgtcatggtgtctgccgtgtaacttttgcccgtgcgcagcacttcaatatccgagactgtgacgggacattcggcaatgtccgccgccgcaagcctgcacatttcaatgcggtctgccccgcttgcaagctgatgtgtcgctttgtgcggcggcgtgcccgtcggaatcaaaatcacgcggtcaagcgacagacgcttaataaattcccgcacaaggtgcacatgcgccgtgtggatgggattgaacgtgccgccgtaaatgccgatgcgcatggcttatgcctttttcgcacgcggcaggacgatcttcggatccttttcgttgcgtttataaagtgcaaatttggaaccgatgacctgcacgacttcgctttccgtctgctctgcgagcgcttctgcggcttcacgcggagagaccggcgcagtctccaacactttgcccttgatgagttcacgcttaaaaatagcgtctgcagcctgctttacgacatctccatcgatgccgcccttgccaatcatcaaaatggtgtcttcatttacggcgagcgagcggagatacgctctttgtttactggtcagcataatttatccctctttgtctttcaggtagttttcaagtttttctgcgaaaatacgcaaggattttcctcggtggctcacggcatccttttcttctgccgtcgcttcgccgaacgtcttgcccgcgcagccttcttcggtgcagatgaaaatggggtcataaccgaaaccgctttcgccgcggcattcctctgcgatgcgcccgtagcagtagccctcagcttcaagtacgtcgccgttcgggaatacacagcagatggcacttgtaaaatgtgcgccgcgcttttcttccggcacgcccttgagcttttcgagtaccgttgccttacgcttgcccggctcggcataccgtgcggaatacacgcccggctcgccgtttaaataatcgatcgataagccggaatcgtccgcgacgcacggcaggcccgtttcgtcacacgcggatttcgccttgatatacgcgttttcacggaatgtggtgccggtctcttccgcctcggtcagctcggccgtctgcacggtgatgccaagcggcgccaaaatgcggccgaattcttctattttatgcgcattatgcgttgcaatgatcatgttcatgcgttatccctccaaaattccgaaatcgcgtgcggcttgctgccaatgctctaaaagtacggggccgcccgctgcaagctcttctgcgcgctgcacgcagaaaagcgaataatttttgccggtgtaaagctgttttaaaatcgcatacccccacacgcccgcgcgggtcagcagtccgctttcacgaatttccagtgctgcggcgtcaatgtcatatggcacttcgagcagcgtttcgttccatgtgtttccgtcggaatcgagcaacgccattttcgccgtgacggtttgcgtacactgcacgccgaccgcaccggggttcacgtacagcttgcccattgtgtgcgcgctgcacggctgatgcgtgtgaccgcttaaaagcacgcgctcgtcgatttttaaaagccagctttctattttataggagaacgggcgcagcgtgtcgcgcgttttttccggtgagccgtggcaaatgcgtatggaacacttgccgtttggatcaattgtctgcataaacggcaatgtggagatgaactcgagatcctccgccgtaagcccctcgtaggtgtatagaagggagcctgttgtagtgccgtttgcccaatcactgccgaagttgtggtggttcagcacgtattcttcgcggttgccgcgcacgaaccagcagggcatttcctgctttgcgcggtatattagcttcatagtctcgtgcgggtttgcacagtccgaaatataatcgccgaggaaaatgtacccatccgctttttgcttttccgcttccttcaggcaagctttcagcgcatggtggttgctgtgtacatcggaaaaaacggcgagcctcatgcttctggtctccgctcgaacagcgcgcgggcgaaatcctccgcgtcaaacggctgcagatcgtccacctgctcgccgacgccgatgaacttcaccggcaaaccaagatcctggtggatcgccaacacaacgccgccctttgcggttccgtcgagctttgtgagcacgatacccgtgagtcctgcggcttctttgaattcacgcgcctgattgacggcgttctgccccgttgtggcatcgagcacaagcaaaacttctttgctgcagcccggcagacccttatcgatgatgcgcgaaattttggaaagctcgtccatcaggtttttcttattgtgcaggcgtccggccgtatcacagatgactacatcggcgtgacgtgcctttgccgcggagatggtatcgtacacgacggcggcggggtctgcgccctctgcatgcttgatgatcggcacgtctgcgcgctctgcccagacttcaagctgctcaatggccgccgcgcggaacgtatccgccgcgcccaaaattaccgatttgccctcttttttaaggcgggaagccagcttgccgatggtcgtcgttttgccgacgccgttcacgccgatgacaaggatgacggatggctgcgtatcgagatgcaactcgttgtcgccgctgaccatctccgtgacaacctcctgcaaaagcgtcataatctcgttcgggtctgtgatgccgcgctctttcacgcgtgcgcggagcgtatcgcagatttcggtcgcggtgttcacgccgacatccgccatgacaagcagctcctcaagctcctcaaacagctcctcatcgatctttgtgaacgcgtggagcatgctgttaatctgcccggtgatgctgtctcttgtttttttcagtcccgctttgattttatcaaaaaagcccattcaggcacctcttttccgaatttatgttgttatacccagtttttcctgcgcttcgtgtgcgtgcagtgccaagagtttcgaaatgccctggtcctgcatcgtcacgccgtagagcatatcagcttcttccatcgtgccgcggcggtgcgtgatgacgatgaactgtgtcttttggttcatgcggcgcaggtaatttgcaaagcgcacgacatttacgtcatccagcgcagcttcaatctcgtcgagcatacagaacgacggtggattcacgcgcatgatcgcaaagtaaagcgaaattgccacaagcgccttttcgccgccggaaagcagctcgatgtgcgagacgatcttgcccggcggatgcacgcggatatcaatgccggaatgcagtacatcgccgctgtccgtaaagcaaagctctgccgatccgccgccgaacaactcctgaaaaatccggctgaaattctgattgatgacggaaaagcgctctgcaaactgcgtctgcatctgctttgtcaagttgtcgatgagctttaacagttcggcgcgggagcgctgcacgtcgtccgtttgcgttttgaggaaattgtagcgctccgaaacctctttgtattccacaacagctgccacattgacggagccgagcgctttgatgctgtttttgagttcggacaaccgcctttgcgccgtggacacatcttcaatcgtgatgttcatttcctcggcttcgcggcgggtgagctcgtattcttcccacagctttttgaggatagcgtcgtattcaccgctctggttttcacggcgttcgcgcagacgagcaagttcaaggccaatcgtctcgcggcgcgaggaagcttcgcgttccttttggcgcaactcgctcgtctgttgctcgagtaccgtgcgctttgcggcgatggcgctgaccgtttgccgtttttcctttgcggtctcacgcagattagcagattcaatttttcggttttcaatatccgcttcgcgcgctttgatcttctcgaagctttccgcaagttcttgatttaaactttctatacgtgcagcgcgctcggattgctgtgctttcagcgtttgcacagcattttcaagcgattctttatctttttcgatggcgagccccgcaaaacggatttcctgcaaatgctgcaaggtctcatcacaacgatgcattgcgtcctcgcggtcaccgaccatggattccattttgcttctggctgcctgaattttgtcttctgtttcttctgttttctgctgggcgctgtctgcggtctgcacaaaaccgctcagacgctttgcggcactttctttttcgtcgcgcagagaagcaaggttcgcggtttccgtctccacgtcgcgtgcggcacgggccgcttccgttttgaagcggatctcatcttccctgtgctgcgccagcacggccttggcgttttcaagttccgccatggcctgcagcacttcctgctgtgtagccttgtagcgctccagtgtttcatttgcagcctgcgccagcatttttgcgtctgcgcgaatgcgtgcaatctccgccgcgcggctcaaaaggccggagtttcgcgccgcggaaccgccggtgaacgaaccgcccgcattgacgatctgcccgtccaagctgacgacacggtagcggaaccgaatacgccgtgcaatctccgccgcgcggtcaaggtcttctgcaacaatagtgcggccgagcagagaatcgcggatgccggcgtactgctcatcacagtggcaaagtgttgaagccacgcccacaaagccgggcatattctgcacatcgcgcgcatcgataaccgtaccgcgcaccgtggtcagcggcaggaatgtcgcacggccggaatcgcgctgtttcaataagcgaatagccgctttcgccgcatcttcagaatcaacgacgacgttctgcatggcggcgccgagcgcggtctccagcgccacggcgtattcgcgcgggacttttaaaagccgtgtaacaggtccgtggataccacgcagattgccgcgcgtgctctcgcgcatgacggttttaacgctctgtgtgaagccttcaagattgcgctcaaggtcttccaacagtccagcgcggcgctctttttctttggcgtcgagcatctggcggtcggcttcggctttcacggcttcggcgcgttttctgcgctgctgtacacgcatttcatgtccctgcacagtgttttcagcgttttgaatgtactccgccgtatcgtgcagcatggcgtcaagctcctcgcactccgtgtgaagcgctgcaaggcgttcttcgctttcggtgatcgcagcatccactgtttcggcgcgggcgcgaatctcctgcatggaggattccgccgaggactgctgcacgcgcatttcggaaagtgcggcgttcagtgccacaagctcagccgaaacggcgtcgatctcacgcgtggtgctgtccgtgccggcacgcagctcctcgagttgtgcggtaaaggcaacgaaatcggcatggttctgcgcagcttccgcttcctttgcttttaccgcctgttctttttcttgaatatccgcttcaagcgtttgtccggtcagcgcggcgctttcaatctcgccatttaatctgcggatggtctgctgctcgtgcagaatatcattttcaagcaccgaaacttctccctctttacgggtggcgagttcatcggcttcggaagccttcaaacgtgcttcttccatctgtgcggtgcagccgttcgtttccgtgaaattctgctcgatttgcgcggaaagcacattgagctcactttcggcttcctcgtagctgttctgtgcggaggcaatcttttcctccacctcgcgcacgatcttgccggaacgctccagcgtttcaagccacaaaccgatctccagttcctttttctcgctgtcgagtgcaataaacttttcggctttctccgcctgctcgcgtaaagggcccacgcgttcttcgagttcgtttaaaatatcgtgcaggcgaatgaggttttcttcggctttttccaagcggcgttcggcttcctctttgcggtagcgaaagcgcgaaatgccggcagcttcttcaaaaatctcgcggcggtcttcgctttttgcggagacgatgctatcgatcttgccctgcccgatgatggaataaccgtcgcggccgaggccggtatccatgaacagctcatgcacgtcgcgcagacgtacgagcgttttgttaatgcggtattcactttcgccggagcggtaaaaacgacgcgtaacggaaacggtgtcgccgtcgtaattcaactcgcggtcggtgttatccatggtgacggtcacttcgcaaaagccctgcgctttgcgctgcggcgtgccgctgaaaatgatgtcctccattttggagcagcgcagtgcgcgggtagactgctcgccgagtacccaacgcatggcatcgctgatgttgctcttgccgctgccgtttggaccgacgaccgccgtgatgccgttttcaaattttaaagtcgttttatcgggaaaggttttgaagccctgcagctccagagattttaaaagcatctgtttacctgcctatcgtagcctgtatatgccgccggaaagcgaagcatccgggcggatgtgcacggtgtagccgtgcttagagaaatgctgcaaattttcttttttctgtccgagcgcaatagaaagcatgcgcgggtcaacatcgatcgtaacttccgaatcgtttcgggcttgaagcgctttaaggacgttttcgcggaagatcgcgctgcggcacagctccataaaagcggggtgaaacggtcccgcgacacggttttccagttcttcgctggcgtgcagccccacacggatgagctttacaccgcgctgctcaatcatcgggatgagctttgcacagagtgaaacggcatcctctaaggtctgcggtgtgtattttcctgcgcggtacaaatcgcacagtggcgtgttttctaagacgatcgtagggtaaatgcgcatggtgttcggctttagcgccaacagcctttcgacagtcttcatcgcctttgcgtcactgtcgccgggcagcccggtcatcatctgcaagccgagctcaaagccgtatgcgcgaattaaccgcgcagcgttttccacatcctttgcggtatgcccccgacgattgagcagcaacacttcgccatccatcgactgcgcaccgagctcgattgccgttacgccgtattgctttaatacggtcagacgttcatcatcaatggcatccggccgcgtagagcagcggataccggcaaagccgtatgtttcgcatgctgcgtgcgctgtttttaaaagcgccaaacggtaatcggggtcgattgccgtgaagctaccgccgaaaaatgcgatctcggcgttctgcacgcgctcccccatttgctttgctgcgctttgcagcagcgccgccacttcttcaggctgcggctgatgattttcacccgtgatgcggttctgattacagaagctgcattgctgcgggcagccgttgtgcggaataaaaattgagatattcgcgtgcttaatagcccatcagctccagtgcttcgcgtgccgcctgctgttcggcttccttcttgctgcgtccgccgcccttgccgatgacattgctgttgaggtgcacctctacggtgaagtgcttgtcatggtcggggccatgctcaccggtaagaacgtattcgagccgttcaccggggttctgctgaatgatctcctgcagcatcgtcttgtggtctttaaacgggcgttcgcctgcagactgcgccgccggttcaatgtagtgcagtacaaagcgcttggcttcctccaagctgccggaatcgagatagatcgccgccgtaatggattcgaacacgtccgctaagatgcttgggcgttctctgccgccgctgtgctgctcgccgtggctgagacgcagcagttcgcctgcgccgaagctgcgtgtaaacccgcaaagcgatttttcgcatacgagcgccgcacgcttctttgtcagcttgccttcgggaatgtccgggaacgctttgcacaggtattccgccgtgacaaaccccaaaatggaatcgccgaggaattccagtcgctcatagctctggtcgccgccgcggctctcgtttgcgtaggaggagtgcgtcagcgctgtgatgagcaggttgcggttcttaaatttatatccgatctttttttcaaattcatccaatgatctcatagttatacctttgctgtcttgttattcgttcgtgttttccgttttctcgttttgtagggctgcggtgatctcacttataatgccggactcggcgtacttcaccgtaagcgcaatggcgtttttcagcgtggaagccttggcgctgccatgtaccttaaagaccggcttcgagcacccgaggatcggcgcaccgccgtattcgttataatcaagctcttttttcatggctttcatgtcgtttaaaaccattgccgccgcaagcttattttttaggctctttttgaaaacggccttgaatttattcatcagcgccatggcgacgccttcatacatcttaagaaggatattgcccgtaaaaccgtcgcacaccacaacatctgccgcatcaaacggaatgtctctggcttcaatgttgccgatgaaatggacgtctttgttttcactcagcagtgcaaacgccgcgtgctgcagttcgccgcccttgtgcggctccgtgccgacatttgcaaggccgatgcgcggcttttgaacacccatgaccttctgcatatacacagagcccatcatgccgaactgctccaacatttcggggcggcattcgttgtttgcgccgccgtctgccagcatgaaaaagccctcggatttcggcatgagcggtgcaaatgccacgcgcttgacgcctttgatgcgcttgacgagcaatgtggcgccaacgacgagtgcgccgctgttgccagcggacgcaaacgcatcgcccttgccctctgccaaagcgcgcaggccaaccgccatagagctttgctttttggcgcgcgtgatcgctgtgggctcatcctccatcgtgatgacatccgggcagtcgatgatctcaaaatcggaaacgttaacattcagcttttccgccgctgctctgatcttcttttcgtcgccggttaaaacgatctgcacatggagctcatctgccgccagacggcagccttttataatttcgtccggggcgttgtcgccgccgaatgcgtcgattatgatccgcatgtttttccctcactttaatattcagcttccggcaaaagccggttttgttcgggcatttcggtttatcaaacacggattttccgccgataaaccgctttagactataattcactctattatagcaaaaaaacaacgcaatttcaataccgcgctccccataagttgcacaaaacaaaaaacgtgcgccaggctttcccggtacacgtctttttctgatttggaggaaaaattttgagttttgatttctagaatttatccggcaggcggatctcgcggcgcacggctgtgccgttgatctcgttaaaccgcacggcttcgttctttacggccattgcggcggctacggcatcggcaatattttggagcgcctgcacatttattacgatgatgattttatgtttgagatcgattccgccattctggtcggcaccacggtgacgatccgcgtcccctattcccgcaacgattccccgcagatccacgcggagcgccccatcggcggcgcagagcaaaattgatgctttatatcgatttttactaaaatactacgcactgcatattcacctcttgtttttttcgattgtcttcgttatctttaaagtagcgcagcgtttatctgcctgatctaaagatgaaaagaggttcaacatgtatacccttagatcccgttccattccgctcaataccgattacgacgtgatcgtggtcggcggcggcccttcgggctgcacggcggcagccgctacggcccgggcgagtcgcacggcatttcctatcgcgctttgctgccgcagggcgtgaaaaacgtgatcgtcgccgggcgttctatttcgtgcgataagcgcattcagggctctgtgcgtgtgatgcctgtgtgcctcacaatgggcgaagccgcaggtgtggcagccgcgttcgccgcaaatgcaaacggcgacgtacatgcggtcgatacagataaattgagagaaacactgcgcgaaaacggcgcgtattttcactaaaacacaacggaggagtttaacatgaaatatgatgtgatcgtagtcggcggcggttttgccggcaccgcagcagcggtctccgctgcaagagaaggcgtaaaggtgctgcttttggagaaaagcggatttctcggcggtgcagccggaaattgctacgtcaacccctttatgggctacacaacgaaaatcgacggcaaaacgacgctgctttccgacggtatttttaccgagattctggatcgtctcgagaaaaaaggcggactgatgccgaaccgcgtgacgttcagcgaagaagttttaaagctcgtttttgacgagatgaccgaagagagcggcgtagatgtgctgttccacgcctacctgctgcgtgccgagcgcgattgtgaccgcattaagtccgtgacgatcatgggcaagggcggcgaaatgacctttgaggccgactatttcatcgatgccacgggcgacgccgatctgacggcatgtgccggtgcaccgtaccgcatcggccgagaggatgacaatctttgccagccgatgacgctgtgcttccgcatgtccggcgtagacgttgacctcgcgttcaaaaacacggagaagatcaacgcgctttacagaaaattccgtgaggacggcaaaatcaaaaacccgcgcgaagacgtgctgaaattcaaatatgtcgcagacggcgtgctgcacctcaactctacgcgcattgtgaagcgatcgccgttcgatctttatgacttaagctttgccgagcgcgaagcccgccgccaaatgttcgagctttacacgttcctcaaagaaaactgcgagggatttgaaaacagcatgctgctgtcctccgccccggagattggtgtgcgcgaaagccgtatgatcgacggtgtgtacacgctgacggtcacggatctcaaggattgcgtacattttgaagacggtattgcggcgtgtaactatgatattgacattcacaacccggagggcaccggcacgagccattattacttcaaagagggcacgtactacaccattccctatcgaagcctgatgccgaagaacatcaaaaacctgcttgcagccggccgctgcatttccggcagtcacgaggcacaggcatcattccgtattatgcccacgtgttgcagcacgggtgaagccgccggtgttgcggctgccgttgccgcgcaggaacacaccgatttcccggaaacggacgtgaagaaaattcaagcgttgctgcgtaagcacaacgcgtttatcggcgagtaaaatctgaaaatacagcgaaaaaccctcgacagctgaaatgtgcttcagcttgtcgggggttttctatcgttcgtcccttatgcgtttttcagtgtttcggcaaggtcttcgagcgcgcgagcggaaagcgcggcgtagcgctcttttttgtcacgaatgtgcggctcaatgacgggcagaatgccgaagttcgcacccatcggctggaaatctttcgaggggctgtgcgcggcgtgctccgcaagtgagcccatcatggtagtgatgggcagaatgagcggcgctttgccctctaaacggcgcacggcgttgcgtcccgcaagcaagccggacgacgccgattccatatagccctccacgccggtcatctgccccgcaaagaacagctccgggcgcgtgcgcatggagaaatccgcgttcaaaagcttcggcgaattgaggaacgtgttgcggtgcatcacgccgtagcgcatgtactcggcgtttttcaggccgggaatcataccgaacacgcgcttttgctcgggaaatttcaagtttgtctggaatcctacaagattgaacagcgttttttctgcgttttcggtgcgcaactgcaccacagcccacgggcggtgacccgtgcgggggtcgcgtaaaccgaccggcttcaacgggccgaagcgaatcgtatcgtgtccgcgctgtgccatgacttcaatgggcatacagccctcgtagaccttcgggttcatcacgtcaaaatcgtgaatgggcgcgcgctccgcggtgataagcgcttcataaaacgcatcgtactcctctttgttcatcgggcagttgatgtaatcgtcgtctcccttatcgtagcgggaggccttgaagcagtgctccatatcaaggctttcacgcgtgacgatcggtgcggcggcatcgaaaaagctaagcgcaccgccgcataagttcgtgatctgttcggcaagcgtgtcgctcgtcagcgggccgcttgcaataacggtcacgccctctgcgggaatttccgtcacttcgccgtgcatcacttcgatgttcggatgctccgtgatcgcttttgtgacgagctctgaaaagcggtcgcggtcaacggcgagcgcgccgcctgcgggcacggcggttttatccgcacaggcaacgagcagagaatccatgcggcgcatttcctctttcaaaagcccggcggcgctgtcgatgcgcgcagccttcaaagaattcgagcagatgagctccgcaaacccggcgcttttatgcgcgggcgaaaacttctgtggcttcatctcgaaaaggcgcacagaataccccgcctgcgcaatctgccacgccgcttcggagccggcaagacccgcgccgatgacggtgacggtctgcttattctccatctttctcccccgcgtcgtccttattgaacgtgtaagtgcagcccggcgttacgcagtagagcgtctgggctttgtcttttttctttaagagcaccttaccgcagaccgggcaggtcttgtcggacggcgcgtcccaagagacgaaatcgcacttcgggtagttgtcgcagccgtagaacacacggccacgcttcgattttttctcgatgatcttgccgccgcacttcgggcactttgcacccgtatcgttgacgattttttgcacggtcttgcactccgggtagccggagcaggcgataaacttgccgtagcggccgaatttgacgaccatcggcttgccgcagttcgggcagacgaggtcggtcttgtcttcttcaagctgaatcttcacgccgtccatttcagtcttcgcctttttgagcgtcttctcaaagtcgtcatagaagtcgtgcagcgtgtgcacccagtcttcctgaccgctctgtacttcgtcaagctctttttcaacggcggcggtgaacttgatattcacaatgtccgggaagcgctctttcatcagctttgtaatgacttcgccaagctcggtgggcttgaaggacttaccctcgcgcgtaacgtattcgcggctcgtgatggttgtgatggtcgcagcatacgtggacgggcggccgatgccgttttcctccagcgtcttgatgagcgaggcttctgtaaagcgtgcgggcggctgtgtaaagtgctgcgtgcccttgaggtcgcggactttcagggacatgcctgcttcaagcttcggcaggtctttgcccttttcttcttctacgtcgcggccctcttcgtagagcacagtgtagccgtcaaacgcgacgttgtagccgcttgctttaaaaatataatcgcctgcggtgatgaccgcctgcgtggtgttcaaaacacagttagccatctggcacgcgacaaagcgctcccaaataagcttataaagcttgtactggtcttttgtaagggaagattccacgtccttcggtgtgagtgcaacggaggtggggcgaatggcctcgtgaccgtcctgtgcgttggcacgcgccttataatggcgtggcttagaaggcaaatactgcttgccccagcgctcgccgatgaactgcacagcctcctgcacggcgtcttcggaaatgcgcagagagtcggtacgcatataagtgatgagacccacggcacccatgccctcaatgtccacgccttcgtaaagctcctgcgcggctttcatcgtgcgcttcgcttgaaagcccagcttgcgtgaagcttcctgctgcaaggtggacgtgatgaacggaggtgcaggctgcttgttcttcttgccttttttgacggactccaccatgaacgcggcggattcgaggtcggcaaggattttatcggactgctctttgttcgtgattttaatctcgccgtttttatcgccgtagaacgatgcgccgaaaatgctgcgggagccctcggcggtcaggcgtgcgtcgatagaccagtattcttcgggcttaaacttgcgaatctcttcctcgcggtccacgatgatgcgcagtgcaacagactgcacacggcctgcggaaagaccgcggcgaatcgtttttgcgaggaacgggctgagcgaatagcccacaaggcggtcgagaatgcggcgcgcctgctgggcgttcacaaggttctggtcgatggaacgcgggtgcgccatgccctccgtgatgccggttttcgtaatctcgttgaacgtgacacggttgtggtaatcctcatcaaggccgaggatatacgcaaggtgccaggagattgcttcgccttcgcggtcggggtcggtcgcgagatacacggtatcggcctcttcggccgcttccttcagttcggaaacaagcttctcctttcccttgatgatggcgtatttcggcttgaaatcgtttttcacatccacgcacaggcgcgccttcggcaggtcgcgcacatggcccatggaagcgatgacttcatagtcgccgcccagatatttcttgatcgttttcgccttggcaggcgactcaacgataacgagtttcgacatggttttctatctcctattctgtatctatttaaaccgcacagcgaatgtgcgagtggaagaatcatgtattaggtgcatttgaaaacaaagaaaatgcgaaacggacaagctttcgatttttcaaatacaccttagtatagcgtacttttacgcctttgtaaacctctggccgggataagttttaatgaggccgaaaagctcgagctccgtgagtgccgccaaaattttccccgtgggcatgcccagttcaagctccagctcggaagcgtgcttgggggtatcgttcagtacggcgtaaacggtttttgcatcttcagaaacgttttgcaaaaggttgttttcgggcgcagggatcggctcggcaggcatcttctctgttatttcgggctccttttccgtatcggaaagcgacgcaatcttcgggcgaacgcgggagacatgggagatattttccgctgtgcgggcaagctgttctatacgctcctgtctgcggcgggaagcaaacggctttaaaacatcctctgcagtgtaaatgcgcgctgcaccgtcctcttccagtgcgatacagccggaaaacgctttctcgtcttcgccaatgaatacgaaaacctcgcgattctgctctaaagcatgctttgcggtgatgagtgcaccgctcttttttggcgcttccgcaatgagcacgccgtgcgccatgccggagatcagccgattgcgcacctgaaacgcgccgcgctgcacaggcgtgtgcatgggatattccgtgacaagtgcaccgccgaaatcgacgatctcgcggcgcaaaatggcgttgtccataagatacggatattcgagcccgcacggcaaaatggcgattgtcttgccgcggccgttcagtgcacccttgtgtgcctcggaatcaatgccgagcgcgccgccgctgataacaacggcgtttttgagcgcaagcccataggcaatctctcttgcggcattgagcccgttttgactggctttccgcgtgcccacaatgctgatggaaacggcatcggaaaggatggtcaaatcgccctgcacatataaaacggcgggcggattgtagatttctttcagcaatacagggtagtcttcgtcatcgggcgtgatgaccttttgaccgagcttcaaataatactcgagcgctgcggcggcctgttccgcgccgtaggcattgagcgcggcaagctctttatccgaaacgaacgaaaaggagctccacagccgtgtgccgccctgatacagcttttcagcactgcctatgcggcgcacgagttgcacaggcttcgggctgcctgcgccaaacgcgttttgcagccagatccagtatacgcggttatccatggcttgtgcctcctgccccgttgcgctccatttcccacagcacaatggcggctgcggtggaggcgttgaacgattccgctctgccgcgcatggggatcgtcacgcggtcatgacaatgctcgatggcttcatttgtgagaccgttgccctcgttgccgatccacaccgcccagtttcccgtttcaaacggaatggtcgtgatgggcgtagcggcgctgtccggcacggcggcgagtgacgtgatattctcggcatgtaacactttcaggcaatcctctgccgtctcaaaacggcggatgccgaggcggaacaccgcgcccatgctgccgcgcagcactttcggggcgtatacgtcgcagcaggcacccacaagcgccaaatgccgcacaccgagcgcttccgctgtgcgcagcacgttacccatgttggacgggtcctgaatattttccataacaagcacatgatggcacgggcgtgtatccggctctgcggaaacaggcaggccgtccgcacggcgcttcggcatgcgacacacgcagaaaatgccttgcgggttctttgtatcggacagcatgggcgcgatgtgctcctctatgcagtatgcgtgctctgtctgctttaaaaccggatctaaataatctttgtattttttagcggcgttttccgtaaagaagcacgcggcaatctccgtttggctccttgcggcatcggcgcaaaggcgtgcaccctcggccatgaaaaggcctgcttcacttctgttttccgctttctgcaaaagtgcggcggcatttttaacgacgctgcttttacggctggtgattttttcgattggcacggtacacactcctttttaccgataataagcagaaatcctgtgcactgtattttacggcacacgggaaatttccgcaaaggcgattttgcacaaagaaatacacttacgtttgcaactatcaccctaaaaaatgtgcgcccggaagaattccggacgcacggatagcttaattatacagaagcctttgccttctcgacaagtgccttgaaagctgcttcgtccgcgatggcgatctcggaaagcatctttctgttgagcgtgatgccagccttcttaagaccgttcataaatgcggaataggtggtgccgttagcacggcaagccgcgttgattctggagatccacagacggcggaaatctctcttcttctgctttctgccgatgtaagcatagttgccggacttcatgacagcctgcttagccatcttaaagtgtctgctcttggaaccccaatagcccttagcgagcttcagaaccttttttcttctcttgcgcgtagcgagcgcacccttaactctagccatttataaaaacctccgattatgctttacttaaacttgagctgccctgttcgcttatgcgtaggggagcatcttcttaacagcctttacgctggtcttatccgtaacggtcgtgccgcgtgcatggcgcttggacttagcagtcttgccatggccgttcagaaggtggctcatgtaagcgtggccacggataactttacccttcttggaaatcttcaggcgcttcttagcaccgctgtgtgttttgagcttcggcattttatagtcctccttgaaattgttacttaacgggcttgggggcaaggaacatcagcatgttgcgcccttcgagcttcgcgggcttatcgacgtttgccgtgtcagcgagcgattctgcgaaacgcttcatgatgtctgcacccagttccggatgacccatctctctgccgcggaaacggatggaaaccttgaccttgtttccgtcgttgaggaaacggatcgcatgatttcttttcgtctcgaagtcgtgggtatcaatgttgagagacaaacggatctctttgatttcaactacgcgctggttctttttcgcttctttttcacgctttgcctgttcgaaacggtatttaccgtaatcgatgattttgcatacgggcggcgtggcctgcggggcaatctttacgaggtcaagatttttctcagccgcaaggtttaaagcgtcacgggccgacataatgccgagctgtgcgccgtctgcgccgatcacacggatctctttatcgcggatctcttcgtttatctgcagttcctgtttgctaatggttaagcacctccatcacgcgtgcgataacttgttttcgcgaagccggcaataaaacagcgggcagagaacctctgcccgcaaatcaactcaatcaaacacactaatatcgtgtgtcttttcgatattgacctgtgtcagacggtactgcacgggtgtgagccatagctccgctttgttttccgaatattatattaccacaaagagcgcgatctgtcaataggcaaacagggcttaaaagaaattttattcttttcccggtgcataaacaggggcgttcatataaaaagagtaaagcacggtgtcgttcacttctttattcatgacgcgggtcatcgcttctttgtagagcgtgagctgcgggccgtatcgttcccacaattcctgtttattgtagcaccgatcggtcttaaagtcaagaatataaagcgaaccgttttcttcaaacatgcagtccactgcaccctgcaggatcatcggctgcgcggcatcttccccgctgagtgttttatccgtgagtcctgcgggaatggaaacgatgaaccgctgctctttataaatgcggtcggcatgtaaaacgcgctgcccgagcgggccggtaaagaacttttccacacgggtcagatcgacggcgtttgcctgcgcttcggtgagatagctttgctcgataagacgtttgagctccgcttcggggtcttttgaagcggcggaaaaatccgcaaactgcatgaagttgtgcagcgccgtgccgcgctctgcgggcgtcagtcctttggcgctcaaaaacgccgggcgtgaaagtgtggcttccgtttcggcttgttctgccgcaagcgcagaggccgcgaccttcgttgcaagctttgtctgtgcggcgtaggggtacacgaacgaaacatccctttcgatgcgcgccttaagcgcttcatcgaccggtgcgagcgcttcggctttcggcaggtcggataaaatctgcggttcactgtatacgacgcgaatatcccacggcgtgtagtgtgtgcgcagaatgatgtcgtcatccgcttcgatgcggcggcgcaggtcatttccgttcgggtgccgcagtgcacagagcatcagccactccgaaatgccggaagcgttgctgaccgtgtacggcggcacggtctcctcctcggtgatctgtgccgcaagcttttgcaggtttgtatcgatatttttcacggtggaaagcagaatgagcttctctttggcacgggtcatcgcgacgtagaacacgcgcagctcctctgcggaagcgctttccgccgttgcaaggtcgatggcctcgcggatgaacgtggtgcggcgcacgccggtctcggggtctgtaaggcgcatgccgacaccgagctgtgggtgcatgcgcaggtcgtccgtatcattcacgaatttccggccgcagcccgcgatgatgcacacgggaaactccaagccctttgatttgtggatactcatgatgcgcacgacgttggcgttttccgagacgacattggcgctttccatatcggatcgattctttttcaggcgctccgcaaagcgcacgaagccggaaacgccgctgtacccgtaggcttcgtattctgccgcgtatttttccagcaggcgaatgtttgcaaggcggctttctccgccgggcatggcgcgcacgatgttctcgtaaccggtttcggtgcacagcatattgataaagctgtccgcaggcatggtggaagcgagcgctcggaaacgcgtcagctcatcgcgcacacgcacacagcgctcgttttcggcgcgcagaagcgaaacgtacaacgtctctcccccgcactcgcggcgcagttgcgccatatcttccgctgtgaagccgtaaatggggctcatcaaaacggagagcagcggaatgtcttgatccgggttatcgatgacgtttaaaaatgccaagatgagcgagacctccgccgcggcgaaaaagccgcccgtgacagccgcccacgtgggaatgcccgcattgcgcagattttctgcatagacaggtgcatatttattggagctgcgcagcaaaatgcagaaatcgcgatattctatgggacgctcctgaccgttttccgtgacggtgaagccgctttccatcagctcgcagatgatttttgcgatacgctgcggctccagcacctctgcgcccacgccgtcgatgtcttccaaaaattccacgcgcgtttcgcagcccgatttttcggggtactgcgcgcccgccgcaagcttttcatcgccgacgtaatcgatgccgccgcatgtgcgggacataagctgcgtaaaaacgaagttgacgctttccgtcacggttttgcgcgaacggaagttgcggtctaacacgatagatgccgggtatgcgtccttttcgcggttatagcgcggaaatttatctttataacggatgaaaatatccggcattgcctgacgaaagctgtaaatactctgttttacgtcgcccaccataaagcggttcgcgctgttttgggagatggattcaaaaagataatcctgcacgtcattcgtgtcctgatattcgtccgtcatgatctcgtcaaagcgctcggagacgagctttgcggtctctgtgcgccgaaatgtaccgtcttcctgctccgttaaaaacagctgcaaggccatgtgctcaagatcactgaaatcgagcacgtttttctcacgctttttcgcgctgtatgttttctcgaacgactgcacggccagaaacagatagacgaccgtgccggtcgtggcggtgatttcttccgtgaatttctggtcttccgcgtcgcctgcaagcttttgcagtttgccgatttccttttttaccatatcgcgcatggccttgatgcgatcggcacgcgggtcttctcctctgaaagaaccgagcttatcgaacgtgacggtcaagtcggaaaagcggcaggtttcaggatcttccattgcctgcagctttgcagaaagcttatcgatatccgcgccgagtgccgtgcagtacgctttttcaaggtctgggtcttctgccgcaaggcggtatgcactgtgggaaagcttgattgcaaagtcatagacctccatgatatgctgccggacgacctcgccccacggtgttttgaccggggactgcgtgacatccgtcatggctttttgaatgtcccgcatccatttgtccggaaacggatggctgcgcgtgtattcgtacattttgaggattgcggcggaaaggcgggcgtcgtttttgtcgccgccgagcacatccgcaaggtctgtcctaaagttttcgtctttgtaccactcggtcagcacttcgtcgagcgattcggtcatcagctcttcctgttgcttatcggtgatgatggagaaatcgggcgagataccgagcaggtagaaaaattcgcgcacaatgtccgaacagaagctgtccaccgtgcagatgtgcgcctgctgcaataaaagctgttggcggcgcaagcgggtgttttccggctgctccttcatgagtgccaaaagtcgcttttcgatgcggtcgcgcatttcggctgcggcggcttttgtgaaggtcacgacgagcagacggtcggcgtccgtaggatgctccggatccgtcaggcgctcgataacgcgctccacgagcaccgcggtcttgccggaacccgcagcggcggagaccagaaccgtaccgcgccgcgctttgatggcgtcgagctgtgcgtcagtccaattcggcattttccccactcctttcctctaagtcattttccatgcgcgcgagcgcttcgtcgtttttcatgctgttcttttcggcatcgtccgcagcgtgctcggagccgcagacggacgtatacgggcaccacgcgcaggcgttgatgttctgcatcagcggttttgccatgatctcaccggaagaaagctcctccgccattgttgcgatgagacgctccacgtagcgcaggacgatctgcagctccggctcatttaaagcggaagccgtaccgctgagttttcttgttttggtgagataaacaggaataaatcgaccgttcagacccatttccattgcattcaaaatctcgttgtcctttaaaagcaggccgttcatgcgcagatttttttccacttcctgctttagcttttcggcgctttccgtgccgtccgaggtcacacttgcaatgaacgccggcatgtacaaaatgcccgccgggtgcaggtctttattctgcgcgagcgccgcgaggtaaataagcatttgcaagctcatgccgtacagaacatcggcgagcttaaactctttgcggccggttttataatcgacgacgcgcacataggtcgtaccgttttcatctttatacaaatccacacggtcgatgatgccgccgaccgtgacgagcccgtttttcgttgggatgcgcagcggtgggtacggtgtgccgtttttgagctccagctcgaaatgctccgggcggaacaggctgtgcatcatttcttccgacatgtgggcgatgagcttcacagccgtttgctccatgcggtacaagcggtatttttcgcgcggcgaaagagcatcatagccgcccatattttcgcgcacatagtccatgatgctcgtgtgtacgcgcgcttttaagtcgtctgcataaaggtgcagcgcttgaatatcttccgcactgccgagaatctgctcgaaaagatagtgcatcagactgccgtattccagcgcatcgatctctgccgggcggcgctcctttgcgccgaggccgtagcggcagaagtatttaaaacggcactggtggtaaacttcgatttggcttgcggaaaaataatgcccgccgccaaagtaatcgtttgcggtctccggcgcaaggcgagccgaagccatgcggtctgtgccgccgaggacctgcaaacgtccggcgaactccggcttttcgcgaaaaatactttttaatgtctcggagacgatcgagttttcgttgaaaagcgacgccgtttgcgaaaacgcggcttccggtgcgtttgcgaaaaactccggcagcaggttttgtgtgatttttaaattcggcagcgccagctcaactgcgctgatgagctcaccgggcgattttgcctcttgccccacactgacgggatacgtaagatacagcttctccgaagcgccgcacagcgcggcgtaggcgaggtacttttcctgtaacatgcggtcttcgagcacatcggagacgggcagctcgagcgcaaggagcgtgcggcgctccggctcgctgaacacaccgtttacggacggaatgagcgggaactcgccttgcacggcgccgagcaggaacacggcgcgcggcgcggactgacggatgcggtctgcggtgccgaatgtgatgctgtccatactctgcgggatgtccgaaacatcctcgccgctgacgatctcctttaagagccttccgtatttttcacccgtgatgatctgttcaccgagcacgcctgccatttggtcgagtacttccatgagcaaatcccaaatgcgcatttgagcggcggaaaggtcatcgcgcccggcattttcgagcgtgcggcaaaatatcgggaagctttgctccaaatcaaaatcgatgagaagcttataaacggcttcggagatctgctcgccggaagcgtgtgcggtgcgctcggagaattttataagcggtgcggtgacgcgttcgcgcagagcgttcagcgtgcgcagtgtctcggccgcggtgtcatccatcggcttaccgaagccgtccgggtgttttgtgaaagggctgcaccaagcggacgcgctgtttaatttccaggtataaacgtagttttcaagctgcgcgagctcttctgccgtaaagcttgtaatgcccgttttcagcatggcgagcacatcttccgaacgccatttgcggctgcccgaaacgatttgaaacgcggagagcacgaagcgcatcagcggctcggcatcgaccgtgcgcgcttcggaaagaaacgccggaatttcccagcggcgcagcgcggcggcaaacagccgcgtgtagcgttcgccgtcacggcagatgacggaaatatcgcggtagcggtagccctcgtgcaaaacaaggtcgcggattttagccgcagtgaagtccgcttcctcatacggagaggtcgcgcggaacacacacacgtttccagcggtatctgcttgctgtacgtggccggcataggtactttccacggcgcgaagtgcatcgttttgaaagcgatacggcgttttacagtacacaggcgaaagcacgcccgtaccgctctcctttgcaaggcgcatcaggcgtgaagcggtgcggcgcacggtagaaaacaggtctttgcggctcgtgtcgagatcgtcgcagcacagcgaaacaccgactttttccgcatggcgcagtgcgtggcgcaaaacgcggtactcctgcacggtgaagccgtcaaacgcatcgacggcgacataagcatttcggaaaaaatccggatggtcggccagcaggtcatcaaggcgcgtcaggtcgtcgagcggatcgagatacgtctgcgcaacgagtgcttcatatgtaccgtaaatgagcgcgatctcttttagtttgcgcgaaaggctgtcttctgtgacggcttcggcggtttttgtgagcatatcgggctcaatgccgcagattttcatttcaccgacggtgttcaataaaacgtccgtcatgcgatcggcgcttttttcaaacagcgtgagttggtcggcacagttttcaagcgccaaggtcatcaaaatacgcctgccgccgtccgttaaacgcttgcctgcaccgccgccgtactgcaaaaatgccgcctgcgcaaggcgcgtaaagctgtacacctgcacacggttcgcggtttcagcaccgtattccataagcagcgcgcgttcggattcaaacgtatattgttccgggacgatcaagatcgttttcggcgcagtgctttccgcaaggcgtttacgcagcagcgtcgttttgcccgtgccggcgcggccgaggatcaactccagcattcttcttccccctttttccgtttagagcttatactgctcttattttagcacatgtgcgctcacgcgtcaaagagttcgcggagacgtgagaaaatttccgccaccttgaatttgacttcgtagctttccggttcacgcacgagtgtatcggtatcatcaggcaggttggataggtcgcttgcaccgggcatgcacagcgccggaaatacgacgcaccaccagtttttaccctcggccttgccgagcgaaatgcgcagtgtgcggtagcgcccggcgggcagcttgaagctctcgtaggtgcgggtcggaaagtacatttcgcaaatttccgctttggcgcagtacgggaggttttcggctttcaagacagaatttgctgccgcttcaaggctttcaaggtgcgtgcagagcgctgtgacggcagtgtcaaaatcttccgcatctccgtaccactgctcggcttcccgcagcacggcatcgcgcacgcgaagctttacggcttgatccgcttcgtcgttcgagtttgcaatgacatgcaaccgcacgatgttctcttccagcgcggcacactgggcggagaagcccgctaaatttagaagcactgttaagatcagcccgcacgccatcgcgcgcagaagaagcgttctgctatacagtgttttgattttacacatcatagatttattctccctgcacatttttgtcgttacacaaaatttcatttaattttttgtataaaatatggacagaaaatttgcggtttatacttttcgcaaagctaaatttccgctatactatatgataaactatgagcatcaaaacgggaggaatttttatgaactggacagtaccgaacaccgaaagccttttacgccgcctgacgaaaccgaaaggtaagattgacgtggttttggacaccgatacgtataatgagttagatgaccaatttgcgctttcgtatatgatgaaaaacagcgacaagctgaacgtaaaagcgctgtatgccgcgccgtttttgaatgataaatccgtatcaccaaaggacggcatggaaaaaagctatgacgaaattctaaagctgctgacgcttttaaaacgcgaggatttaaaagccgtcacgtttaagggctcggaaacatatctcacggacgaggacacgcctgtgctttcgcctgcggcggaggacctcgcaaaacgcgcgatggattatacacccgaaaagccgctgtatgtcgttgcaatcggtgctatcacgaatgtggcttccgccttgcttttgaagccggaaattcgcgaccgcatcgtccttgtatggctcggcggcaatgcgctgcactggccggacaaccgcgagttcaacatgtatcaggatgttgcggcggggcgcattgttttcggatgcggtgcggcgcttgtgcagctgccgtgcgcaggcgtggtctccggcttctccgtgagcgagccggaattcaaagactactttctcggcaaaaacgagctgtgcgattatttggcacattatgccattgaagaaggacggcgctgggcgcaggcggaaacatggtcgcgcgtgatctgggacgtgacggcggtggcgtggcttttggacggcgagttcatggacgacacgcttctgcacagccctattccccagtatgacgacacatggacgccctcgaacacgcggcattttatgcgctatgtgtacaatatccaccgcgatgttttactcaaggaccttgtgcaaaaattgacggaaaagtaaaattttcgtgcaatttcggcttttacgtgctatacttaattttgtagtaaacagaatacgcaccttttcccttattttgatccgaaaggttggttgtctcatgaaaaagctgattcttgtgacctcaccgcccgcgtgcggtaaaacccggctttccaaacgcctgtgtacggcgctggatcatgttgtttatttggacaaggacacgctgatcccgctttccaagcaaattttcaaagtggcgggcgaaccgtatgaccgcagctccgcgttttttgaagcgaacatccgcgactacgagtacgagacgatcttggaccttgcgtttgaggcgctgcgttatgcggacaccgtgctcatcaacgcgccgttcacacgggaaattcgcgacacggcgtacattcaaaatttgcgcgcaaagctcggtgaatatggcgcgaagctgtgcgttatttggatcgtaaccgaccccgctgtgtgcaaggcgcgcatgatgaggcgctcttccgaccgcgacacgtggaaaatggaacactgggacgagtacataaagggcgtgaattttgatattcccgaaaatctgcgtataccggacgacccagaaagtcttttgctgtactacaactcgaccgacgaccttgcggacgcttcatttgcccgcattttaccgatgctgaaccaaaactgattttaggagcctactcatgcagaaaaccgataccctgtataccgcatacgttgaagttttaaaagaagaattgctgcccgccatgggctgcacagagccgattgccattgcctatgcggcggcagcggcgcggcgcattttaaacgagctgccgtgtgaagtctgcgtcacggcgagcggcaatatcatcaaaaacgtgaaaagcgtttttgtgccgaacaccggtggtctgcgcggcatccctgcggcggctgcggcggggatcatagcaggacatgacgagcttttattggaggttatctcaaaggcgaccgaagcagagcaggcggagatcaaggcttatatggagcacacgccgatcaccgtgaagctttcggactctccctatattttcgacattgacattacggtgaaaagtgagcatcacacggcaaacgtgcgtattgtggggcaccacacgaatattgtgcatatggaaaaagacggcgaaatattgctcgatacctgtgccgatactccggcggaaagcacggacagcggcatttgcgaccgcagtttgttttcggtgaagacgattcttgagtttgttgagtgtgcagagctttgcgatattgaaacgcccgtaaaacggcagattgactacaacacacgtattgcgaaagaaggtttatcgggcagttggggcgcgaacatcggcaaggtattgctcgaaacctacggcgatgatgtgaaaatccgcgccagagccatggcggctgcgggcagcgatgcgcgtatgaacggctgctccctgccggtcgtcatcgtttccggcagcggcaatcagggcatgacagcttctctgcccgttgtggagtatgcaaaagaattgaacgtcggctatgaaaaaatgattcgcgcggtggcactctccgaccttgtgacgatccacctgaagtccggcatcgggcggctttccgcgtactgcggcgctgtgagcgcaggctgcggctgcggcgcgggcattgcgtatttatacggcggcgggctgaaagaaatcgagcacacaatcgtcaactccattgctattgattccgggatggtatgcgacggcgcaaaagcctcgtgcgcggcgaaaattgcatctgctgtggatgccggcattttgggctaccacatgtacaaaaacgggcagcagttccgcgcgggtgatggccttgtcacgaagggcgttgaggagacgatacgcaacatcggcatactggcccgcgaaggtatgcgcgagaccgaccgcgagattttgcatatcatgtgcgattaaatgtgataaacaaagagacgtttctctgtagttttacagggaaacgtctctgttcattttacataaagcgctccggcagacgaaaacagtccgccggagcgcttggtatgttatagactttgcttcaagatttcttctgcgcagcgcagaccgtctacggcggcgctggtgatgccgccggcgtaacctgcgccctctccgcacggaaacagaccgcgcaccgtggggcactcgcgcgtctcgtttcggaggatgcgcacgggtgaagagcttcgggtctcgggagcggtcaataaagcgtccgggtcgtcaaagcccctcagccgcctgcccatgcgacggatgccctccgccatggaatcgcagatataatcgggcagcacggcccttaaatcgccgggcacaactccgggccgataggtcggctgcacgctgtcgttcagcgcagtcgttgcgcggttttcaagcaggtcgccaacgcgctggcacggggcactgtatgctcccccgcccgcttcaaatgcggcacgctcgattttacgctgaaacgcaatgccggcaagcggatgcgcggaaccgaaatcttccggcgtgatgccgacaagcagcgcagcattgctgttttgaccgtcgcgggcgtattcgctcatgccgtttgtcacgacactacccgtttcggatgccgcaccgacgacgtagccgcccgggcacatgcagaacgtgtacacgccgcggccgttttcaaggtgaacgttgagtttgtagtccgccgcgccgagtgcggggtcgcctgcaaaatcgccgtactgtgcgcaatctatcgtctctgcgcggtgctcgatgcgcgcgccgacggaaaacggcttcggctccataggtacacagcttttttcaaacagcattttaaatgtatcgcgcgcactatggccgatagcgagaatgacgtgtgcggtctcgatcgtctcattcgcaccgtttgtctcggcaacaaccccacaaacagcattgtttttgacgagcaggtcggtcatctgcgtgttgaagcgcacttcgccgccgagagacttaatctcctcgcgaatggcgcgaacggtttgcggcagcttgtccgtgccgacgtgcggctttgcgtcaaatagaatgtcttcaggtgcgccgtgctcgcagagcgtttgcagtacgaagaaaatgcgctcatctttcgtgcctgtattgagtttgccgtccgaaaacgtgcctgcgccgccctcgccgaactgcacgttgcagcttgggtttagttttcgcatctgccagaaggtgtttacggccgcttggcgttcttctacggagccgccgcgctctaagatgatcgggcgcaggccggcgcgtgcgagcaataagcctgcgaacatgcccgccgggccaaaacccacaacgaccggacgctgcgacaatgtaccgtgcggcggtattgcataggttcttttcggcgcttttgtgacgtggctgtcgcgcacgcgggaaagcagcttgtcttcgtcgccgtccgtttccacatccacggtaacgacaaagcgcacgtcctgcttttttctggcatcgacagagcgcttgacaagtgccaattttttgagcttctgcgcatcggtacgcagttttttggcggctgcgcggcgcaaagcttcgtccgtatagtgaagcggcatggaaatgtcgctgatgcgtatcatcgtttttcctccttcaggcagcgataggctgcgctttttccggctgtgatgccgcttgcccacgcaaaatgcagattgtagccgccgcaatcgccgtggatattcagcatctcgcctgcaaggtaaagccccggggcttttttagatgccatcgtgtgcgggtcgagctccgtaagcggcacgccgcccgccgtgacctgcgccgcagaaaaatctttcgtgccggtgatgtccaacctccagcctttaaggagagaagcaagctttttaagctgtggtgctttgatttttaccgccgggtcgctttgcgcgatgcccgccactccgacaagcatgtagccgagacgcatattgagtaggccggagagcagatcgcccgctgcacgtgcgggatacaattttgtcatctcaaggagataatcgagcacgtcctgataggccatatccggcaatagatcaagctgtacggcgagtgaagtgtacttcttattgcggatcgtgccgagcgcaaagaactcgccggcatacacggaaaggccgaacacgcagatgccggagataccggtatccgtaaactgcacctcgccgctttctttatagacgggtttgccgtctgccaaaagcacggcatttgcaggggcgcgcgtgccggacagcgttttccactgctttgcgcgcacggtaagctgtgttaaagacgggtacagctttgtcaccgtgtggccgagctgctttgcgagcgtgtagccctcgccgcaggaatggcgcggagatgccgcaccgccgcacgtcaaaatgcactgctttgtgaaaagctgcgtgccgtccgtacagataagcgtaaatccgtttttgactttctcgatttttgagacggtgtgttcttccgaaaacgacacgccgtatttttcggcatcccaccgcaaagcggagagtacggccgctgcctgctgattctgcgggtataccctgccctcgctgtccggtttggtgacaagccccatttcgcggaacacggcacaaatagcttcgggcgtgtattcatgcaataggtcttgaattgccgtaacatcgccgtggtaatgcgcgggcgaaacgtttaaattcgttaaattgcagcggccgttgccggtggcgagcagctttctgccaagctttgcgttgccctccaaaacaagaacagaaccgtggtttttcaaaacatgtgcggcggcacacgacgccataagccccgctgcaccgccgccgatgatgataatgtcttttgtttccatttaaacttccttattaaatgaacatgccgagcaggccgtaggagaagatcgccattaaaatatccgcgataagcgtgccgccgatgacggagaaaagcgcgtctttaatgggcattttcatcagcgccgcggcaagcgaacccgtccatgcgccggtgcccggcagcggaatggcgacgaagatgagcaggccgaacgtcttgtatttttcaatctgcgcaaacttgcttctgcccttggcttccatgcggtcaacaagctttacaaagcgcgtgttgcgcatccagtcgaaaatcttattgataaagagcagaatgaacggcgtcggtaaaatggtgccgatgaagcagatcagcatggcaggcaataaatctacgccgagcattttcgccgcaacaagaccgccgcgcagctcgatgatgggcatcatggagaggatgaacaccgtaagctcacccggaataatatttctgaaaaaattgacaagtgcttctaccatactgaattgttcctttcatgatccgttctttttcaagttccttaaaagttccgcaaataagtatactaaacgtcatggtttttatttttctttttaagaattatagcttacgttttgctgacaaaacgtgctcaagatgttttctgtgcggcacaataggcttcaaggtcgccgaacgagtagcccgtttcttcccattttgtaaggagctcatctaagatttcggcgttcgtgctcgacgtgctgtgcagtaaaacgaccgcgccggggtgaatgcgcggtaataatttagaaaatgcctgctcgggtgtgggctggtcatccgtataccaatcgacataggcaaggctccaaaacaccgtggaatacccgagctgctgcgccattttgaggttttcctcacagaatttcccctgcggcgggcggtagagcttcggcatttcgctgccgagaatgtccctgtacagcgcttcattcttttgcagctcggtctgaaagctttggatatcgccgatcttcgacatatccgggtgcgaatacgtgtggttgccgatggtgtggccttcctctgccatacgttttacaagctccggctgcgtctcaaaataattgccgacaaggaagaatgttgcctttacgccgtgctttttgagcgcgtccagaattctctccgtgttgccgttttcaaagccggcatcaaacgtgatgtagatctctttttggttcgtgtcgccgacatacagcgcgtcgaaatttcttaaatactcctgcgaggcatttgcaacgggcggtgcgccctcgctttgaaagctcaaaccccaatcggtaatacctgcggcggcctctgccgcacccaaacggttgactgcgcgcaaagcgcaaaccataccgatacacaagagaatgattgcccaaacaacataaagcacctgctttttaccgaatatgtgcactttcattctgcgttccccctatttctttttataaagagtatgtgcagccgcataaaaaagaaccgggatagcattgcgaagcacatgaaaatcctgtacaatgataaaaagatgaattgtaagctgattgtaagaattctattcccgattttgtaagaggtattctgtatactttcagcatggagtgaaaaggagggcattttatgccggatatgaataagaaaaccattttggttgtggatgacgaccacgagatcgtgcgcgccattaccattacgctggagcgcgagggctaccatgtactgaacgcttacgacggcttgcaggcgctggattgcgtgacctcccgcgaagtgcatctgatcatcatcgacgtgatgatgccgaagctggacggactttccgccgtgatgaaaattcgcgaaaagaaaaatctgcccatcatcattctttccgcaaagggcgaagacagcgacaaaatccttggcctttccatgggcgcggacgattacatttcgaagccgttcaacccaatggagcttgtggcgcgggtgaaatcgcagctgcggcgctacaccgatctcggcgacatcaacacgcgcagcgacaacgtgatcgtgaacgggcgtttgacgttcaagctggacgagcacgtgctgtatgcggacggcgagcctgtaaaactgacggcgacggaaacgaaaatcgtggagcttttgatgaagcacccgggccgcatcttccccgccgaggaaatttacagccgcatctggaacgaacccgcgtactcggcggaaaacaccgtgatggtgcacatccgcagaattcgcgagaaaatcgagctgaacccaagcgagccggaatacttgaaagtggtatgggggatcggttatgaaattgaaaagcactaaccttgcccgcggtgttttcgcctggttctgctttttgctgtgcgcgttttctattattgtggggttgacttttgccgtgtactacccagatatatttgaagccataccatctgcggtagataaatgcggtcaggcactttcaggcgatctgcgtgaaacagatagctacaaggataatgtttccattctgtttgagcggctatattacagcacgcaaagcaatgctgcttcaaacacctcaaccgatgtaaccgcggaaaaggacaacgatgtaccctcaaacggctatcactactacatttcacgggatgaatccagcacggcactttcttgggtctatgtggaatcgatctcaaaggatgttcttttctcggtaacggactacagcacagaccccgccggcaaaacgatcacgaacgactcgaactgggatgcgcagacgctgccggagggcttcaattaccttttcacttgtgaaaacggtgtgacaaaaatttactacagcgacaaagacggcgatttaaactgtgttttcagcagtgatacgcctggcgcattttacacgctctcgctttcctacacgcttggcgcattaaagcaaagcaatgctccatcaccgaaaatcagctttgcggtgcgtgaaaagccgacctcttattctttatcgaatgagatcgtcagcgatgcgcagacttgggtcaacaatatacgctttgctataagtcttgttgccgctgcggtcgtgatgttcactttgatgctgctgctttccattttgttccggcaggacagaaagctgtttgagcgttacattgcacacggactcaagtggatttggatagaaatcaaagtcatagccgtatttgtatgggctttcgttgtgctcaatatcatttcgtatggatttgaccctgcaggcacagctgttaccctgttctccgtgttctttgtgttctatttgctcggcatcgatatttcccacaaccggcggatttatcggcacaacatcattcattccgttttgaagcttgtgcttggcaaccgcgaaggaaaaaaattcgagcagattgtttaccgcaaatacatggcgactgccggtattttggtggggctttgcatcgtaggagttttaggatatgtattcttttacagccattggttgatgggtacgatttggtttgtcgcgttttacgtcggtctgtttttcgcgggtgtgggtacgcttgtatggtttgcgtgggcactgcgcgacgacctgcgcgattacggcaagctgatggagcaggtggagcaaatgtacaagggcgaccttgacgcgatgaatcacctgcccgccgcttccccgctttatgattccgctatgcagctcaatatgatccgtgacggcatccgtatcgcggtggaggaaggcatcaaatccgagcgcacgaaggtggagcttatcacgaatgtttcgcacgacatcaaaacgccgctcacgtccatcatcagctatatcgaactgatgaagaccgagccggatctgccgccgcacatgcaggattatttgaaaatcgtctcgcagaaagcagaccgtctgcgccatatgctgcaagatattttcgatgtctctaaagccgcaaccggcaatattacgctgatgccggaatacatcggtctcgataagcttttgcggcagacgctcggagatatggacggcgtgatgaacgacagtgagctgacgtggcgcgtgcagatcccgcaggaagacttccccgtttatgctgatgggcagcgcatgtaccgtgtgttccagaacctcattaagaacgcggcacaatatgcgcttgagggttcgcgtgtctacgtggagctgcaaaagcagggtcaaaacgccgtcgtgacgattcagaatatctcgaaatacgagcttaccatggacggcgattcgctgacggcccgctttgtgcgcggtgatgacagccgttccacttccggcagcggccttggcctttctattgcaaaaagcttcacggaggcctgtggcggtactttccacgtgaccgtaaagggcgaccttttcaccgtgatgatttccctgccgctcaaagagccgccgaaggagccggaaaaggaaccgctgcccgaaacggcagacgcagagaatatagcaagcgagccggaaaccaaccccgacgcgctccccgaagcttcggaacagacagaaaacaccgaatccccggagtcttcggaaccggaaaattgaaaaagttgagcatataaaaccgctcgcaggaaattagcctgcgagcggtgctactatgcaaaagcacggcgcaaaatttttctcgcgccgtgcttttcgtctatataaatgttatttggttgctttctcaagtgcctgcttgatgtcatcgaggatgtcttccgggttttcgatgcctacggagaggcggataagatccggggagacgccggcttcctttaattgctcgtcggtcatctggcggtgcgtggtgctggccgggtgcagcacgcaggtgcgcaggtctgcgacgtgcgtgacgacggaggcaagctccaaactgtccataaagcgggtggccgcttccctgccgcccttgatgccgaaggaaatgacgccgcaggtgccgtgcggcatatatttcatagcaagctcgtggtacgggctgctctcaagacccggatagttgacccacgccacacggtcgtcctgctcgaggaattcggcaatcttctgcgcgttcgagcaatggcgctccatgcgcagtgcgagcgtttccatgccgaggttgaggtaaaatgcgttcatcggggcagcctgtgcgccaatgtcacgcatcaggtggcagcgtgcttttgcgatatacgccgccttaccgaagtgctcggcatacacgatgccgtggtaagattcatccggctctgtgaactccgggaacttgccgttgttccaatcgaaattaccgctgtctacaatggcgccgccgagctgcaccgcgtgaccgtcgaggtactttgtggtggagtgcgtaacgatgtctacgccgaactcgaacggacggcagttgataggtgtcgggaacgtgttatcgacgatgcacggtacgccgtgcgcgtgtgcggcgtttgcaaacatttcgaggtctgtcacgacgagagacgggttcgtaagcgtttccgcaaacacgcagcgagtgttctcacggaatgcggcgttcagctcgtcctcggtgcagttcggcgaaacgaatgtgcagtcaatgcccatttcatgcagggttttgtagaacaggttgaatgtgccgccgtatacggcgctggagcacacaacatgacctcctgcgtggcagatgttcagaacggccatcatggtggctgcctgaccggaagatgtgacgagcgcgcctacgccgccctcgagtgctgcaagcttcttttccacagcgtcgagcgtcgggttgccgaggcgcgtatagaaaaagccgtccgcttttaaatcgaacagatcgcccatttctttggagctgtcataggtgtatgtggtgctttgtacgatgggcagaacgcgcggttcaccattgccgggcgtatagcccgcgtggatacatgttgtatccggtctgtactgtttcatttggacttccccaatctttaataatatcctattttcgcggcagtgcttactttgtgaaaagcgcttttaagagatttgcgatgaaatccgagccgagcacgaccaaaatgacgattgccatgaacgcgatgacggaaagcgactggatgagcatacgcttgccgcggggcatatcgtcctcttcggacgttttttcctgcgactgctgctcttcccgctctttgagtatcagctctttggcgcgttcgaggtcttggtattccacgtaaatatccttatcggtcggcagatactccgggtcgtacacgctggtggaaaagccaccttttacggggtgtatcgcatggcgcaccgcgttttgctcaaagagcaatgcgagctccgcagcttccccctcgctgaccttgaggaaaaacacttcgtcctcgggctttacgggccgcagaccgcggctgcgcttgcagttcggacaggtttgtgtggaatcctcgcagatgcttttgcatttcgtgcagtagagcataatagcctcccatttcggcattgccgtttctgcttttcagtatagcacagcttttttacaaattcaactgcctttcgcggcgcacttcatcgcaaaacaggctgcaactgttctccgagtctggcgtttgcaagcgtttcgggaattaggtcgaaatgtgcgacgagagaattcggctttttaatggggtcgtcctgtccgaggggcacaaaatagatatttttcgtgttcataagcagaccgatgtttttgcacgacgcaccgagagcatcgtttgtggcgagggacagtataacgggcatggaaacgcgcagggcggattttaccgccatcgtgacggctgtatccgttacggcatttgcaatcttcgcagcggtgtttcccgtgcacggcgcgacgagcacggcatcggcaagacgcttcgggccgatgggttccgcttctgcgatggtgtggataatttttcgtccgcagatattttctatgcgctcgtgaaagctttccgccgtgccgaagcgtgtatcggtcgtgtacgccgtttcgctcatcacgggcagcatatcccagtcctttcgcagcagagcaagctgcgcgagagctttttcaaatgtgcagaacgatccgcacatggcaaaggcaagcgtgggcatgtcgatcactactcctccaaaatattgtagaccgcctctttgatatactccgccgccgtcttcggcgcgacgcggccgggcagcgagggcgcgtcgatgacatgcaggtgcaattcttccgcacgcttcaaatcgatgccgccgggtgcggaggcgagctcgatgatgagcgtatcgcgcgtttgctgcatgagcacaggcgaagtcaaaacctttgcgggcacagtgttgaaaatgagatcgaaccttctgctgatctcgcggtacgtcaacggctgcacgccgaacgcgcgcatttgcatgagatcggcctttttgcgcgctgcgcagaatacctctgcacccataccgcgcaggataatcgccagatttttcccgatgcgcccaaaccccgtgatgagacattttgcgccgtttatcgtgccggggtattcgcgaatcgcgatgccgaccgcgccctctgccgttgggatcgcgttgccgacggcaagctcttcgcggcggtagtagtcttcgggctcaatctcacgccacagggaagacgaggcggtcaaccgctgaagcatgccgccgcacaccgttttgtgcataaaaagacgcgaaaaatcgtcatctaaacgaatttcgttttcggcatacggcgcgtttaaaaacagaccgtcctttgttgcgggcagcggcaaaaggatgacggagcttttcgccgcaagctgcggcaggtcgcattccgctgcgccgcggcaggtgccgagcttttctaaaccgcagacacacacgggataaccgtccgccgcaatggactgcgccaaatatttcatgcgcacatcgccgccgatgacgccgaatgtattgatcatgggcatatttcccccacctttcaaattatcatccgcttcattttatggaaacgggcggcttttgtgcgccctgaaagacttttttatacttttttgaatttgctatttatttttctgcacgttggcggtataatgtatgtgtatgggtatgcgatttcggacgcatagctatgtttttgagatataacacagtgtattacataatttcagataattttgcaaaacaagttttgcgtgaagccaattcagaaaggactctttcgttatgacgaatcagaataatacgaccgataaaaacgttaacctgctcgataccgtacgtcgtctgcactttgtaggcatcggcggttccggtatgtgccctatggcggagattttacaccacaaggattatatcatcaccggcagcgacatcaatgaatccgacacgctcgcgcgcattcgcagctacggcatcccggtgcacatgggtcaccgcgcggagaacatcggcgatgcggaggtcgtggtgtacacggcggctgcaaagcaggataacccggagcttgttgcggcgcgtgcaaagggtattccgacgttggagcgttccgtgatgctcggccttttgacgaagaagtttgcaaaccccattgcggtttccggcacgcacggcaaaacgacgacgaccggcatgctcacgcagatcttgattgaagccggacgtgacccgagcgccgtcatcggcggcaagctgccgttcatcaacggcaacggcagagtcggcaaaagtgcggacattgtttgcgaagcgtgtgaatatgtcgatacgttcctgcagctccaccccgccatcagcatcatcacaaatatcgatgccgatcatctcgactatttcggcacgctcgataatattgtgaagtcgttccatcagttctgcttgcagacctcaaagcgcatcatcgtcaatgcagataacgccaacgccatgcgcgccgtagagggcattacgaatgcggagatcgtcacatttggcagaacggataaaagcgattactacgtgacggagctcaacgaagaagatacggtctgcgaagactttaccgttatgtataagggcgagcgcgtttgccgcgtgagcctgcgcgtgccgggtgagcacaacatgatgaacgctttggcggctgccgctgcggcacatggcatgggtgtggacggcgagcacatcaaaaaggcgcttgaggacttctccggcgtacaccgccgctttgagattttaggcaaatttgaaggtgtgaccgttgccgacgactttgcacaccacccgacagagctttccgccgtgctttccgctgccgtgcgcatgggctaccatgaggtttgggcggtattccagccgcacacttattcccgcactgcaatgctgctggatgattttgcaaaagcgctttccatcccccagcatgttgtgatgacggaaattctcgccgtgcgcgagacgaacacgtataacattcacacaagcgaccttgcggcgaagattcccggcagctgctggtttggcagctttgaggagattgcggattatgtgatgacgcacgctaaggaaaacgacctcattttaacgcttggcggcggcgacatttacaagtgcgcaaatctcatcgtagaaaaatacaaagagagagcataaatttctaaaaggctttccgcgcgaaagccttttcttttggaggtaccatgtcttttcgcgccattttctttgacattgacggcactttgctcgggcgggataaacgtatgccgccttcgacgctgcatgcactaaaaaaggcgcgtgaaaatggcgttttgttattcgttgcaacgggccgtgtgacgccaatgacgtatttcctgcgtgattattttgattttgacggctttgccgcgatgacggggcaatattgcttcgataaaaacggcaaggttttacatacgctggcgatcgacccggaagacattcggcttttaatgcagctgcaaaaagaggagcctttcccctgcctgattgccgaggggcgcgagtgttttgctgcaacacccgcaaagcagatcgacgataacttttacagacataatttgcccgcgcctcccctttatgacgtgtcgcgcatcggtaaacacgaggtgtatcagctgatgctgtatgacccggaaatctatgcttcgcgcattttgcctttaaagcatattaagtatacgcacacagtttcctattgctacgatgttattcatgagaacggtggcaagcaaatcggtattccggcgatggcggcgcattacgggataagaaacgatgaaattctcgtgttcggtgacggcccgaacgacgtggacatgctgcgcgatgtcggcttcggtgttgcgatgggcaacggttgtgcggaagccaaagcggctgcagattacatcacagcagatgtgggcaacgacggcatttaccgcgccttgaacgagctcggcgttatttaaactataaacggaaagccccgcaaaaccgattggttcggtaattgcggggcttttgctatgcggaaaattttatcgtttgtattttggtgcggcggcgcggagcgtgtgccaaaggagcgcagcggcaatgatggcggcgcttacggcagcgccgatggaaaggcttttgtagccgagcggccctgtgaccatggagacgagcacggcaacggcggcaatgcacagcaaaatgatatatgcggctttatccatatgctcgagtacatttttgttcatgttcataaaagcatctccttaatcggcaagctgattgacaacagcggcaaactccggcagcgtgagtgcttcggcgcgggaatttgcccgaaccccggcttgctcaaatgcgtctgtcacttgctgcttcgacatatgcagtgtgttggaaatggaattgacagccgttttgcggcgctgtgcgaacgcagcgcgaataacgcggaagaaaagtgcttcatcgtgcacatccacaggcggttcttttcgaatacgcagctgaatgacggcggaatccacattcggtgcgggcataaagctgccgcggctgacctcgaacaaaatttccggctcggcgtaatactgcacggccgcactgacagcgccgcactcgcgcgtgccgggctgtgcacacaaacgctctgccgcttctttttgtaccataaccgtgatgctcgtgatgggcaaacgatcttccaaaagcttcatgatgaccggcgacgtgatgtaatacggcaggttcgcacacacggcgacctcttccccgttaaattcttcttcgatgacgcggtgcaggtcaatcttcatcacgtcgtcgttgatgaccttcacgttatcgcagtcggcaagcgtttcgtctaaaacgggcaacaggcgcttatcaagctcgatggtgacgactttttttgcgacctgcgaaagctcgtaggtcaaaacgccgatgccggggccgacctcaatggcgcctgcgcagtctgccgcgccgctcatctcagccatgcgcgggcagacggagggattgatgagaaagttctgaccgagcgccttggaaaagctgaagccgttcttttccatgacggctcgaatggtggatatatcggaaagtctttgcatagggatatcctttcgattaaaatgtcactttatagatctgcacgccgttttcgtcaaagacacacgggaacagcgctttgatctccgcttcgttcacggtgaagttattgcgctcgtaagcggagaccagaatgtaatccatgctgtatttttcaaagagcgcacagtttgcctgcggtgcagagaacatactttgcatgtccgtttcgcgctcggtgtaatcgagcccgtgaaaatacacgtagcttgtggagccgcagacgatgtttctgcccgtcagcgccgcgatctcgttgttgtggcgcatatcggtcagcacagtgtcttccggctcggtgttctcataaatgtactccgctgctttgagctgactgtcgccgtataagcaatagcccgcaatgctctctctgccgatggtcagcaccgcagaaagcatgcatagtacgagcgcgccgacagccaatgtgcggcggcccggcagcgtgcgcaggcggcggtaaatttcgaccatatacgaagcgactacgccgcagacaagaaaatatgcggcgtaaagcagcttgttgttatcataggtattcggctggaacacgacaaactcgcaaatgaaccaaatgacggccgcgggagcgcagaccgtgaaccggcgctgatctgccgtgaaaaatgcaggcaggaacaacagcgccgtgacgccgagattcacaagatagaaccacaaatagccgtcctgcaaattgccccagttgtaccacccacgcatgaagctgtctccgctcgcctgcgagaatgtccacgtgaaaagctgcggtgcggcaagcagcagtgtgatgagcaggaatacgccccacgtttttacaagctgtataccgaaacccttgcggatcgccatggagagcagtgcgagcacaaacaaaacaaacgctgcggcacaaaccaaaaccagatacagaaacacggatgattcgcgcgagatgagcttcggcgtgacgaactgcgcgccgaacgcgagcaacatcaaaacgagtgcagcgacttttgcggtaaactgcacatgagcactgttgccccggaacactctgcggcacagtgcaaagcaaagccacacgccgcaaataagtccgaacgcgaggaacgaatgcgtatgaatcatgacaagtccgcctgcaaaaataccggcaatgatgaaataccgttcgcagtgctcataaacggcgcggtacagcacgtataaaagcgggaataaaaccgcccagccgaacagcgttgcgcgctgcgggatgagcatatccacaatgacgttcacccagcggatattttgatcgacaagattcgtgggtgtctcataaaacgatgtaaaaatgcgggtaaaattatctgttccgttttgcagattcgggaagaaatacgcaaagccgaagccgccgtttagaaaaaacaaaatctctgctaacgcggtcttcgctttatcacgcagccagcgttgccagaaaagatgtgcgccgaaaaacacctgcgccccggcaaaaagcatcggcagcacatacgcaaagcgcagcggcgcaccgagcaaatataggcttgaagaaatgctgtccgacaagaacggatacgaaagcttcacgcccggcaaaatggaatacatgggcggaaatgtcttctgctccgcgatactcgtgatgaacccgaggtgcatgctcatgtcgccgtaggtgcattggctcgaccagatctcgccgttttggtaacggaagctgtgcagcaccaaaaacacgaacagcagccacaagccgagcggcaaaagcagtgtgcgttctgcacggcagaaggctttgtgtttgccgggaaaatcattcggaagcagcttcggacgctttaagaacacagcgccaaccgtcagcaaaagcagtgagatgagcgccaaaatatgcgctgtgatgctgaacgaaaacaggaatgcccacaacgacggcagccacattaaaagcacgctgcccgcggcgctgccgagaattctttgtgtatatcgccgctctttatttaaaaagcatgcggcaagtgttacgccgcacagctgaaacatcagaaaatacagcagcgccaccgcgccgcccaaaaaattgccgcccataaacagctcctgaatttgttctttaatataatatattgtaccattttggcgacgggatgtaaagacggcagaaaaggttttattgcagcgcttacgcgctttttcacaaaacacccggaaacggggttgaagttcaaaatgcaatgtgctacaatatattttgataattatggtgtctcccctgcggttttgcgcaaaagcgaacgatgatacgcaatcgtatatgtgtagtttccgattgcggagtgcctgaatgcaaagtgaggtgttcttcgtggagaatgatatccatcggagagataaaacgaactactatctggatctggctgaggccgtttcccagcgctgcacatgccttcgacgtcactacggcgctgtgatcgtaaaaaatgatgaagtgatctccaccggctatgtcggtgcgccgcgcggaagaaaaaactgcacggatatcggcaaatgcgtgcgcgtggaaagaaatattccccgcggtgaacgctatgagctgtgccgtagcgtacatgcggaagcaaacgccatcatcagcgccccgcgcgataagatgatcgacgccacgctgtatcttgtcggcaaggaggtctctaccggcgactatgtgaaaaacgccgtatgttgctccatgtgcaagcgcatggtcatcaacgcaggcattgcacgggtcatcgtgcgcgatgaccacgatcggttcagagagatagatgttcaggattggatcataaatgacgaatccatcgaaggtgtattcggctattgagccttaccccgttaccgcgtatccggcatagggctcggaaagaatacggtgaacatttatgtctttaatacaggtgtcaaacctgaccttcggctatgaaggcagctttgataacgtctttgaaaacgcgtctttttccatggatacaaactggcggtgcggctttatcgggcgcaacggcagaggcaaaacgacgtttttaaacctgctgctcggaaaatacgcgtacagcggcaccatttccgcttcggtcaactttgagtatttcccgtttgaggtggaaaatccggacgatacgccgcttgagattgcggagagcatcatgccggactttgagatgtggcggctaacgcgtgagctcaacttactcgacgccgacccgggactgctttaccgcccctactcgacgttaagctacggcgagcgtacgaaggtactgctgtcgattttatttatccgcgaaaacagcttcctgctcatcgacgagccgacgaaccacctcgatattgaagcgcgcaacacactggctcagtatttaaagtcgaaaaaagggttcatccttgtcagccacgaccgtgcgtttctggacgaagtcatcgaccatgtgctttccatcaaccgcgcggacatcacggtgatgcgcggcaactttacgacgtggcaacaggagaaggaccgcgaggatcaatttgagttacaacaaaatgagaaactcaaaaaggatgtgaagcggctggaggcggctgcccgccgcagcgcggaatggtcaaaccgtgcggaagaccgcaagatcggtttcaaaccggagcgcacggaaaagacccttgaccgtcgtgcctacgagggtgaaaaaagccgtaagatgatgaagcgtgcaaagagcattgaatcccgccgcaacgatgcactggaggaaaaaagcgcgctgctgaaaaacattgaatcgaccgatacgaaattgcagattgcgacgctgcgccacccgaaagaccttttggtagaggcaaacgacctttctattgattacggtgacggccccatcttttctccgctgcgctttgagatccgcagcggcgaccgtgcggcattgcagggcaaaaacggctgcggtaaatcgagcatcataaagctattgtgcggcgaagatgttccccataccggcacgctgaaaaccgcaagcgggcttgtggtctcgtatatcccgcaaagcgcggagggactttccggcacactgcgcgactatgcagagcattgccgcattgacgaaagcctttttaaatcgatcttgcgcaagctggaatttcagcgcacacagtttgaaaagcgcatggaggatttttccgaggggcaaaagaaaaaagtgctcattgcgcggagcctctgcgaaaaggcacatttgcttgtgtgggacgaaccgctgaacttcatcgatgttatttcccgcatgcagcttgaaacgctcttaaaagagtgtgtgcccacagtcattttcgtggagcacgaccgccgctttgtggaaaatgtggcaacaaagatcattcggttataattgcgggttaaaatctgaacaaagcgcgtcgtgcagggctgcggcgcgcttttgttataaaaatcaggggctatgaaagagagaaatctatgaagcaaagaagcgactatattggcatattgaacggcatacgcgcgtattccattttgatcgttgccgggtttcatttgtggcagcaatcctggctgcaaaatctgtttccaaacaatttgctgcagtttatgggtgtgcggaatttcagcttaaactgggtgccgcgcacgggctacatgtttgtagacgtgatgctgctgctttcgggattctgtctctttttgccctatgcgcggcaaatgaccgacccgcttgcgccggagccggataacctgcgcatattctttaaaaagcgtgcggcgcgcattttgccatcgtattatttgtgcttgcttctctacctcattttctgggtgcggccttcggattacgcgaatgtcaagcaatacttgcaggatatttttgcgcacctgacgtttacgcagacgttttggccggaaagctacatcggcacaaaatttccgacagcactgtggacactcggcgtggaaatgcagttctatctcgtcttccctttgctcgcacgcgtgttccgtcgctttccgcttgtgtgttgggcggtgctttccgttttggcgcaggtgtatatcgtgctttttgcacatctgccgcaaggcaacgcagaaagcctgcgcatcaaccagctcccggcgtttttgggtgtatatgcaaacggtatgctgtgtgcgctcttcttctgccgcctgcggatatggcgcgagcgcgaatggaagaaaaactgtattttaccgcttgcggcgctgatgctgcttctgttcagcggtgctgccgttgtgtgtatgttaaatgacgggctgagccgtgcggcaatcgtccagcgctggcaggtggattaccgctttctgttttctgcgatggtctgcgttttcattttgcttttggatgctgcaccgaaaggcgtgcaatggctgttttcaaaccgcatagctgcttttttgtcggcggtctcctataatttctatatctggcacagcacggtgcttttaaagctgaaagcgtggcgcattccgtattacccggatgccccggagggcgctgccgcatggccgcaatccgcaggcggcgagccgtggcactttgcttggcaggtaaagtacacggtgctgttttgggcgtgtgcgctccttttggcggcgtttttcacctatcttatcgaaaaaccgacagcaaaacagctgctcagaaagaagaaaatcacccgtacatagaaacagaccgccgcggcgtatttcacgcattcggcggtctgtcttcatattctgtccgggttacggaaaactattccgttttgccgtcttctttctgcccgtaagcgcggtcggctgcttctctcgcaatatcgatgacgctgtattcgcgcttttcgccctgttcgatgataggcagcatttggtagacctctgccgccatgccgtgcccccaaagcatagggtcgatacgcatggagtagccgtggccgttttcgcacatccaatcggtcattttggcgcgaggcaagccgtaagccgctaagatcgtcatgatgacgccgccgtgtgtgacgagcacggcactctcatctcccgtcatcatcatgtttttaacgagcatctcaaagcccgcgcagacacgctgcataaatacgatgctgctttcgccgttcggcggggcctcgtgctggccaccgttcatccaggcgacgaacttcgggtcgtttttcaattcttcggcttttttattttcccaatcaccgaagtcgcactcggcaagctctaaaataacttccgggtcggcggtgggatataagaccttcagcgtatcgacacagcgcacgcacgggctggcgtagtacttttttgcttcgggataaatgcccttacgtttcagctccaaaagcgcctgaatgccctcctgcgcaagcggagactgcgtgcggccgatgtaacgaccctccaaattgccctcacatataccgtggcggattaaatgaatggtgtaagatttcatgcgattttcctttccgggacggtaaaacgctgccgttgcgtccctttcaccaaaaattcgcgggaaaacccgcaaaaaaggttcgtttatctgtttacttctcggataatttcgtttataatttacagagtgttattttttgactcaggtggtgaaacttttgtgaacattgattttccgcgcattctgacactgctgcgcaaggaacagggtatcagccagaaaaaagctgccgcagaccttggcatctcgcaggcgctgctctctcattacgaaaaaggcatacgtgaatgcggcttggacttcattgtgcgcacggcagattattacggggtctcctgtgattatctgctgggcaaaacaccgcaccggcagggcgaaaagctgcatgtgccggaaacggaggaggaagacacgcacgatggtctccccaacgtgagccgaaaaataatatcgaactccttacatattgtatttggtattctgaaaaaaatcaatagcaaatctttaacaaaagagatcacgctgtatttgagcggcgctgtgtataacgcgttccgcatgctgtatacggcgaacccgaaaaatccctcggctctttttgaaacgaaggacggactgagtgaggcgctgaccgacggccgtatgcagctggcgcgtgccaaaagccgcgtgatgctgctcggcgaaaaagtgtcggacgacgaggccgttaaaaaagacgacctgccccagctttccggcgagatgctctcggcggaatatcccgattgggcgccctcgctttttgcattgatcgagaataccgaaaacgaacacaaggaaaactaagtaaaccaactgcaaaaaggaggcaaactgtatgtgtggttttgtaggttatattgacggcggcgaaacacagcttatggagcccgtgctgcacgctatggcagaccgcatccgtcaccgcggcccggacgacgccgactattacatggacggcgagatctcgctcggtttccgcagactttccatcattgacctcgaaggcggcagacagccgattttgaatgaagataaaagcaaggttctcatgtttaacggcgagatttataactatcagtctctccgcgaagaacttttaaaggcaggccatgtattcacaacgaaaacggacagcgaagtgctgctgcacggctttgaagaatacggcaccgacctgctcaataagctgcgcggcatgttcgcgttcatcatttgggataagaacacgaaaacgctgttcggcgcgcgcgattactttggcattaagccattttactatgcaaagatgcagggcacgttgatgttcggcagcgaaatcaagagctttgtggaacacccgcactttaagcgcgagctgaatgaacgcgcactggagggctacctttctttccagtattctccgggctacgagacattcttcaagaacgtttacaagctgccgcctgcacattatttcttctacaaagacggcaaaatggatatgcagcgctactggatcccggaattcaacgcggaagaagacaagccgcttgaatattgggtagacgagattgaaaagacctttgacgactccgtgaacgcacacaagattgcggacgttgaagtcggctctttcctttcctctggcgtggattccagctatgtggcctgctctgccgatgtggacaagacgtttacggtcggctttgacaacggcgaaaaatacaacgaaatcagctacgcaaaggagctttccgagctgattccggtgaagaattacagcaagacgattaccccggaagagttctggggcaacttcggcaagattcagtaccatatggacgagccgcttgccgacccgtccgccgtggcactctatttcgtgtgcaacacggcttccaaatatttgaaggtcgtgatgtccggcgagggcgccgatgaaattttcggcggctacaacatttataaagaaccgctcgccgtaccggcttatgataagattccgttccccatccgtcgctttatcggcaaagtcgcttcgcacctgccgaagaaatccggcatcaacttccttatccgccgcggcaaaaagctcgaagaccgcttcatcggcaacgcgtacatgttcacggaggaagaacgcaagaagctcctgaaaattaagaccgatgcaccgtctccggcagaagtcgtaaagccgttctatgatcgcgtaaaggataaagacccggtaacgaaaatgcagttcgttgaccttaacgcctggatggtcggcgatattcttctgaaagcggataaaatgagcatggcaaactcccttgaggtgcgcgtgccgttcctcgataagaagattatggagcttgcggagcgcatcccgctcaagtaccgtgtaaacgacgagaacacgaagtttgcgatgcgcaaggccgctttgcgccgcatgcccgaaaagtgggccggcaaaaagaagctcggcttccctgtgccgacgcgtgtgtggctcaaggaagacaagtactacaacatcgtaaaggagaagttcacgggcgaagtggcacagaagtacttcaacaccgacatgctcgtaaagctgctggacgaccacaaaaacgacaaggcggacaacagccgccgcgtttggacggtctacacgttcctcgtgtggtacgaccagttctttaacgatgatattctcaacggctatgcggagcacacagacacaaagaccgcgtaagtatttggaaggaaaataaagatcatgaatacagaagcattaaaaaaacaagattttctgccggttctgctcggcagtgacatcaacgtatacggcatggcgcgttctttccacgaggcttacgggtacaaaagcgtagcagtcggcaagggcatcctccccgcctgcacgcacagccacattgtggaagttttaaaggtagaaccgcgccttgaagaagacgacgtgtttgtccgcacgctgacggaatttgcaaagaacttctccgggcagagattactgctcgtcccctgcggcgacaactacatcaaaatgcttgtgcgcaaccagacgaagctgcgcggcatttatgaattcgagtgcatcagcgaagagcttttaatgcgcctttccatcaaggaaagcttttatcaggtctgcgaggagcatggcttctcgttcccgaagacaacaacctgcacgtatgagaaccacaagaatcttgagctgcctttcgacttcccggtcatcatcaagccctcgaacagcgtggcatactggaactgcaagttcccgcacaaaaagaaggttttcgttgcaaacacccgcgaggaatttgatgcgattttggacgccatctacggttcctcttacaaagatcacctcattttgcaggaattcatcccgggtgacgattctaaaatgcgcgtgatgaactgctactgcggcaaggataaaaaagtaaagctcattgcactcggtaatgccgtgcttgaggaacattccccggagggcatcggcagctatgcggccatcatcaacggctacgacgaaaagctgaacgagacgatgaaaaacttccttgagggcatcggttacgtgggctttgcaaacttcgatatgaagtacgacgagcgtgacggcaaatataagctcttcgagatgaacctgcgacagggccgcagcagctatttcgtaacggctgcgggctacaacattgcaaaatggctcgcggacgacgtcatctacaacaagcccatggatctcaccattgcgacaaataaagtgctgtacacaatcatcccgacgaagatcatctttgactattgcccggacaccgccgtgaaagcggaagcgaaaaagctcatcgacgaaggtaaagtggttaactcgtattattacaagaaagaccgcagcctgatgcgctggctgatgttccgccgcaaccagcacaactactttgaaaagtacaagcgttattttaacaacaaaggactgcgtgactgatgaacagtttaggcgttatcggcggactcggccccatggcgacagcgtatttattagagcttatcactgacatgaccgatgcccgcaccgatcaggagcatcttgacgcgatcatattcaatcgcccgagtgtaccggatcggaccgcatacattttagaccatacaaagccctcccctgtgccgccgatgatcgacatcgcgcagaaattggaggcgctgggcgtgtgcgcactcgctaccccgtgcgtgacggcacacagctttcacgatgaactgcaaagcagcgtacacattccgtttatccacatggtgcgcgaaacggcagcatatctaaaagaagccggctgcaaaaagcccggcattatggcgacaaccggcacggtgcacatgggcttatttcaaaccgcgctgaccgaagcggggctttcctacgttttgccgaacgacgaaatgcagcagaacgtaatgtcgctcatttacgactgcgtaaaagcaggtgaaccggcggacatggtaaaattccgcgccgtttccgacgctttgcgcgcggacggctgcgacgctattattttaggctgcacggagctctccatcatcaagcgcgataacgagcttgggcccggttatctcgatgcgctggaagtgttggcacgcgcgtgcattttagcgtgcggcaaaaaactcaagccgaaatattcttccctgatccaacaataaaagcataaggaggcgttttgtatgtgcggctttgccggttatattcacaactacggaacgttcgataaagaagaagtcatccataaaatggccgaccgcatcaagcaccgcggcccggatgatgcccattattacattgacgacggcattgccctcggtttccgccgcctttccatcatcgacctcgagggcggcaggcagccgatcttaaacgaagacggctcgcttgtgctgctctttaacggcgaaatttacaactatcaggagcttcgcgaagagctcatcaaagccggacacgtcttcaccacaaagacagacagcgaaacgattctgcacggatacgaggaatacggcaaaagaatccttgaccgtctgcgcggcatgtttgctttcatcatctggaacaagaacacaaaagagctctttggtgcacgcgatattttcggcatcaagccgttctattactacaaaaagggcaaggaattcatgttcggcagcgagatcaaaagctttctctcccacccgaattttgaaaaagagctcgacgaggatatgatcccgttgtacctttcctacgagtacagcccggacgagcgcacaatttttaaaaatgtcttcaagctgcccggcgcacactgcttcacctacaaaaacggcgaactaaaagtggagcgttactataagatcgaatataagattgaagacgataaatcgcttgaatactgggaggacgccatcacaaaggagttcacggagtccgtctccatgcaccagatcgccgatgttgaggtcggctgcttcctctcctccggcgtggattccagctatgttgtgaaagaaatctccaagggtacgaagaaggtcaagacattctccgtcggctacgaggaggaaaaatacagtgagctgccgtatgcgcaggacttctccaatgtcatcggcgtaccgaacatcgcgaataaggtttccgcagatgagttcttcgacgcggtgccggagattcagtattacatggacgagccactgccgaacccctcggagatcccgctctacttcctcgccaaaaatgcccgccgctatgtgaaggtcgtgctttccggcgaaggtgcggacgagctgttcggcggctacccgatgtatcttgcaggcggacactttgaccactattcgcataaggtaccgcgcccggtgcgtaaagtcctcggcacggccgcaaagcactgcccgaacttcaagggcaaaaacttcctcgtgcgcggcgccatggagccgtatcagcgctttatgcgcgcaaactacgttttccagagcgcagagcgccaaaaattcttgaagcgtcccatcgcgagcaaggttccggaggaatacagcaagcgctatttcgacgaagtatcgaatctcgacgagccgacccagcttcagtatgtggacatgcacacgtggatgatctatgacatcctactgaaagccgaccgcatgagtatggcaaactcccttgagctgcgcgtgccgttcctcgataaaaagatgctggagctttccacacgcattccttcccgctaccgtgcagcaaacgaaacgacgaagatcgccctgcgcggcgcggccatcaagcagctgccggagcgtaccgcgaacaaaaagaagctcggcttccctgttccgctgaacgattggctgcgtgaggataagtactacaacaaggtcaaggcggcgttccagagcgatattgcggagaaattcttcgtaacaagcgagctgatgaagctgctcgacgaccacaagagcggcaaagcgctgaacatgcagaagatctggtcgttctatacgtttattctttggtatgagcagttctttgtgctgaactgaatatagtcgaaaacagcgtcaaattacagattggcgctgtttctttatgaaattattttgttttgttaacaacagacaagcaaatttaaaagaaaaacaaaagctttattcttcccttttttgggcggaataaggctttttcttttgcaactttatcgtcttgcacggcggtacgcggccggtgtttcgccggtgatgcgtttaaactggcggatgaaatggtatgggtctgcatatccgctgtgctcggcaacttccgtgatgggcaagtcactgccggagagcaataaagactgtgcataacgaatacgcgcttcaatcaggtcgcgcatgggcgatgtaccaaaaaccgcgcggtataacgcatgcaggtgcgaagcgctgacagacgcaagcgatgccatttgcggcacagtccagtgcttttccggatcagaaagcactgtgtggcgcaggttctgcatcttttccctatctgcacggctgaccgcaggtgagtagttttcttccgctatggcgcgggagaaacgcacaagaaattctgtggtgtatgcttccaacaagtcctcccgaaacggttcattggagaaaaatgcagcttccgtttttcggaaaaggccggagataaactctgtcgtgcgtgggtaaagcagtgtgttttcgggaatacgatagcgcaaaagctgcacgcgaaagccaggcgcaaaatgcgcccagttgtgcgtgaggttactgtctgagtgaaaccactgtggttcatccggcgcatagaaaatacacgcgccgggtcttactgtgaccttttccctgttaatttcgatctctacgctgttcataaagtgcaaaaaagtgtagatttcaatgcctgttgggcgcacaagtgtaaacccggctttttccggccaatcgtggcgaatatctgtaatctccattttgacgccccctttgctttatattatacgcaaaaactccccgtgtcgcaatagaataagtcaattttcgtgcatgatacgacattgtattttgcatagtgattgcgtacaatgaaaccgtaatcaaaaaagcgcggcagaaattgagatttgccgtcttttcggggaaaggatgtacgaaaaatgagtaatataccgagaaaagaatatccgcgcccgcagtttgcgcgcgaaaactggatgaacctgaacggcacatgggcgtttgagatcgataacggccgcagcggtgaggcacgcggcttacagaaggtcggcacagcgctcagcggagagatcaccgtgccgttctgcccggaaagcgaactttccggtgtgcagcacaccgatttcatgtacggcgtgtggtataagcgcactgtaacggtcacagaaaaacagctgaagggccgcgccgtgctgcatttcggcgctgtggattattgcgcaaaagtttttgtgaacggcgagcttgccggcacacacaagggcggctatgtttcgtttgagtttgacgtgaccgcacttttaaaagcgggcgaaaatgaaattgccgtctacgtcgaagataatacgcgcgaccgcctcatcccgagcggtaagcagagcgagcaatataactcatacggctgcttctacacgcgcaccacgggcatttggcagaccgtatggctggagttcaccccgaaggcttatatttcccgcgtgcagtattatccgaacatcactgcaggcacggtaacggtgaccgcagagctggtcggtacggcaaacctcacagcaacggcttcgtttgaaggcaaagaaatgggcagctacacagctgaaaacgcctgcggcacgcacacattcacgataaagctgagcgaaaagcatctgtgggatgtcggctgcggcaatctgtatgacgttgcattcgctttcggtgaagataacgtcacgagttatttcggtctgcgcgaagtgcgcctggacggccacaagttccgcatcaacggccgctctgttttccagcgtctggtgctcgaccaaggcttctatccggatggcatctacactgcgccgagcgacgaagcgcttgaaaacgacattaagctctcccttgccgtcggtttcaacggtgccagactgcatgagaagatttttgaagagcgtttcctctaccacgcagaccgcttaggctacatcgtttggggcgaatttccgaactggggtctcgattcctcctatgccgattccgtttacggcattttgccggagtggacggaagagatccgccgcgattttaaccacccggctattgtcggctggtgtccgtacaacgagacatgggatactgacggcaggaaacagtttgacgacgcactcgacatcgtttacagagcaacgaaagcgcttgaccctacccgtccgtgcatcgatacgagcggcaactatcatgtggcaactgatattttctgcgtgcacgattacgagcagaacccggagatctttaaggagcactatgacaagctgatgaccgagggcacactgtttgacaaccacgcgcaccgccagacctacaagggcgaagcgacgttcgtcagcgaatacggcggcattcagtggagtcaggacgagaacggctggggctacggcaccggtccgaagaccgaagaggaattcctcacgcgttttaagggccttacagacgcattgcttgataacagtgaaatgttcggtctttgctacacgcagctgaccgatgtggagcaggaacagaacggcctttacacctatcagagaaagccgaagtttgatcccgcgttcttccacggcgttttgagtcgcaaagccgcaatcgaagactaacagatacgtttggtgcccgcagttttttcgctgcgggcacttttttatcaaaatacaggaattttgttgattttcgtcatacgtacgtcacaaatacatagtattttatataatagagtaattttgggcagcaagcttctgctgccggatactgttctgaggagtgtatttatgccgcaaaatcactttagagaaccgaaaaaccgatgtgaacatcttctctcttccctaccaatcgtcttgccggtggcagccgtgacgatatccgccgccgcgtttggcctgctgttcctgcaaggggatctagtggagcgcgcggaggaaaccgttacatacactgcagcgattggcacagatgacgagcaggtggaaatgtacgcctacgatgcgggcaacgatgaagttgaggaagccgaagaagaagcttcggaaatgaatgccgcgccttcctatgccgcgaaagagcgcatttttccggctggcgaagtagaagacaccgcagagcttgtagatgcatacagctctgtgccattattggtttccagcggcaatcttgcggagcaaggcgtgcagacacggcttgaactgcttgaagattattttccaaacggcatgtactggaaccatatcggtgtggacacaagcgaaatgacagcagacgaaattgccatgtgcgttacagacacgccgtgcaaccattctgtttatggttatggaaactgcaacatttataatggactgatggatgatttcttcccgcaatacggagacgaaacgcaatgcctcggctacgcttccatcatcagcgacctgctattcggctacgatgcaccgatcacggagttttacgactttgacgagttgcgcatcggtgatcacatccgcatgggttggtatgagcactcgatgatcgtgacggacatcgactgggataccgataccatcaccgtgacagaagtaaatgcagattacgaaaactgccagatctcctggggtcgacaaatcacccgcagcgagcttctcggcatggaaggcgaccttacctattacacgcgctacgcaaattgaaaatcggttgttctgcgcctcggcaagattttgatgtcttttcggggcacattttatattttccaaaagttacacgatacaaaaacaccccgaacgacgcaaaatcgttcggggtgtgctgattcagagaatcaattatttaaccatgttggcaacttcgcttgcgaaatcgtcgtttctcttctcgaggccttcgcccttctcgaagcgaacgaaatccgtaaccttcatcgtgccgccggccttctttgcttcctcagcaatgtactgctcaacggagaggtcgccgttcttaacgaacgcctgctgcaggaggcagttgttctcatagaacttgccgattctgccggtaaccatcttctcgatgatgttctgcggcttcttggagttcttcggatcgttctggatctgagccatgaggatttctttttccttatcgagtgcttcagccggaaccgtggacttatcgagataagccggattcagagcggcaatctgcattgcgacgtctttgccgcactcgttgagaacttctgccggaacattctcggtctcaaaacgaacgagaacgccgattctgccgccgccgtgtacgtaagcaacgcagtcgccctcgtaacggacgaagcgacggatcttgatgttctcgccgatggtgagaatcttatccttcagcatagcatcaacggtcatatcggagccgtgtgccttagctgcaaggagagcttcaacgtctgccgggttctcatagataacagtctcggcacaggtcttaacgaaatcgatgaactgagcattcttcgcaacgaagtcggtctcagcgttgacttcgatcacaacgccaaccttaccgcactcgctgaccatagcgtatgcaacaccctcagctgcaatacggcttgccttcttaacggaagctgcaaggcccttctcgcggagaatctcggttgccttctctacatcgccctcagcctctgtgagagcctttttgcaatccatcatgccgcagcctgtcttagcgcgcagatctgcaacgtccttagctgtgaaattcatttcaaatcaccattccttgtagaatcttaaactctatatcaaacgaaaggaatttttaaccgaaattaaattattcctcggtctctgcagcagcttcttcggtctcctcagcagcagcgcccatacggccctcgcggccttcgatgatagcgttagccatagcacctgcgatgagcttaacagcgcggatagcgtcgtcgttgcccgggataacgtagtcaatctcgtccggatcgcagttggtatctacgattgcaacgatcggaataccgagcttcttagcttcggaaacagcgattctttcctttctcgggtcaacaatgaacagtgcgcccgggaactccttcatgtccttgatgccgccaagatacttttcgagcttttcgatctcgagctcgagcttgctgacttccttcttcgggagcagctcgaaggtgccgtcttcctgcatcttgcgcagctgtgcaagtctctggattctgcggcggatggtcgtgaagttggtgagcatgccgcccagccaacgagcgtttacatagtaagcgcctgcgcggagagcctcttccttaacagactcctgagcctgcttcttcgtgcctacgaagagaacgctcttaccttccatggaaaggtcacgaacgaagttgtaagcctcttcgagcttcttaacggtcttctgcaggtcgatgatgtagataccgtttctctccgtgaagatgtactgtgccatcttcgggttccatcttcttgtctggtgaccgaagtgaacaccggcctccagaagctgcttcattgatacgactgccatttgaaaatacctccttggtttttcctccgccgggctgatattttcggggaaaaccgctttcgcggcaccaatccgagagcctcggcgtgcgtttttgcttgcagaatctgcaaatcgctgaactattatagcacaacatgccgggtaaagcaagtgttttctatccgttttcaaagaaattttgtaagaagctgcgcttcggtgtccgctttacgggaatgtgatcgaccagcaccgcatcctctccaatggtcttcacagcgctccatgggatcacacagtcattctctctgccaaacaatccgaaaaagcgcggacggccgtacaccacgatcgccgtcagtgccgcctgctgtgtatcaaattcaacatcaccgagatacccgatgcgcgagccatccaaaacactgataacctctcgcccatgcatttctccgatgcgttctaacatatcgctcccccgtttcgccgtatttttccgatacagcgtatgcacagtagggatacattatgcgtttgcatcctttaaaatgacttcggcaatcgtttcggcggcaaggttcgagcccgcttcgttcggatggctgccgtcgtcgttgaaaagattttcggtttcgtttttttcataaaatgcactgccgacatcggcgagcagcgtgtgatttttctctgccgcttctgcataggcttcgtgcattttgcggtacatctcatcgtaatccatgccgaatttttgaagctgtttgccgtctttttggtatgcccatgtcgcatacagaaccggtacggcaccgttttcacgaattttaccgcacaaatctttcacgctctgcataaaactttcctttgctgtaatagggccgttgctcatctcctgcaaaacgacgtaatcccatttttcattttgcagcagctccaatgcttttgcgccgagccttgtttcagggttcagctgctcacgtaagcgtgcaccgccgcgtgtgttctgtactacttcggcacccgtgatttccgccagtatactcggcagatcatttgtgaaaatatagctgtttccaagcattaaaatgcgcatatttatttctcctatcctcatggtactttatcattcgtagtatagcatatttttgaagttcggacaagaaaaaacgcccggttcttacactgtgaagtgataaaataatggtagacgcaaaagagcctaccattattttatcacttcactcgccgcaacaagcgagggcttttttgaactctaggagtttactttatttccgtcacaaactatatacttctatcataagccgaattccgactttcaggccttcctcaaaagcagtcttctcccatgtgcagcacaccgtcccctgccggtccataatcttttcccagagtggaatcttatcgccgacatagtcatctacgagcctatccattccttccaagccacgcagccactcttccagttccttttccttggcctttgctgctttcccggcaaacgtgttcttctctactggattattctccgtgtaatgctcgtagatcagatccagcagattctccactggcgggtaatactccggctctgttttcttcaaatactcctccagcatttccttcaatttttctataatgctaccatccttcccaactgagattcacatcctcagttacggcacatattaccgcacacttctgtacatagcaacctattttttgcggtcttttagacggcccatcttctcctttacctcatctggcacatcgattagcccgaaccgatagaacattccgtatatgtaggtcacgccccggatatcacccagagctttcgggcggtctactacctcccctttaatattcttcagtgccagcagtactgaactccatgccagacttttactgttctcccggcggtcgatccacagttcttttgtgtattcgccgttcctgccttttttaatttcgtaagagaatggtaagccagagtaggttttgaatttcacaccagcataggccagaaccactccccagaagctctcttctgttggctcatccctccaccgcttcattgctctatatctccgctgccgctctgccccaacactgattttctctttttctgctgtgcttgggaagtacacacctttccgatatggcaggtacgaggtgatggaggctttagatagttcaagggttgctgcggttgagaggattgcttctttatagttctgtgtttctcgatactcctcaaaggtatcctgtaccttctcggctacttctgattcatacacacctgccgtgatgagcagcttccgtaccttgatgggatttaatcccagctcatctccgatgacctgcaaggacatctcagaatcataaagcgccacagcacttttcatctgctctttcaggttcttcccggcatcgtactctggcttcaacttcttccggccaccgcctggttttcttgttttcttcattttactcgtgcagctccaacggcagtccgtccgggtcatggaagaaagtcatcttcttgccggtgtaatcatccacacgaattggctcacattcaattcctacctctgtcaactcattcactgtctgctccacgctctccacacaaaatgcaaggtgacgcagcccacaggcctccgggcggttcacacgcttcggcgggttttcttctgcaaaaatctccagctcggtgtgttcgttaacacgcagatctagcttccaatctttacgctctggacggtagttttctctgataacagagaagcccagcttgttcacatagaaatccttagctgcttcatagtcagatacgatgattgcaatatgatgtatttttgataaattcattttatgtcacgctccatttcttttatttccgttataaactatatagcaaccttcaaaaaaccgtgtgaacttctggagttcagtttgtccacacggccgatctcatttcagtttttcgaggatttcatccgcactcatgccgctggccagcagcttcttcagcacagcctctgcttcggtcttcttcgcttcttcaacggccttagcatctgcctttgccttcttcgattccagggatgccacttctttttcggccttcttcagagcagtcttcttctctttcaatgtgttcttctgctcctcaatcgctttctggatggatgcgatctcggtattcagagacgcaatagcctccttcttctctacaatctgggatgcatagtctttggtgatattggttttaggacggtttttgctacctttcgttctgggcatggtgataacctctttcctttttaatggtttaagtatagcactgtgggatggtgagggcaatgcatttaaatcacaacattaagttaacattttttccaacttcattcagtgccatatcagataactcaccttgactgttcatatgaattgccaaaataatatactctgtcaaaaacatatctgtgtacattctaaaagtatctctatttgcattgatgctgttcattcgagccgcaacattgccatgaaagttattgcatcgagaagcataaagaattccaaatagaacaaatgacaatctttcttcatctgtaaatttatattttttcttcgtgccctgcgcatcacagaatgtaatctcagcttcttctcctaacataagtgctcttaacttaataccaaagctgtgtgttatagctcgactctttcctttatttgcatcggaaattccgagatccactgtattaccaataagtgtagggctggaaatctggcagtatgactttccatatgcattatccaaaatttccgatagcaacgaaattttgccttttaacgatttatacgaagaagctctatatttttctgctattccattcttttccatcgcatatcctttaagcatatacgaggccacatagtgaaatgttttgtccggcagcccttccaaaaaaggctctagaattgctttatatttattattccaatttgctaaaattgtaccacgaacaaattcaacacctttagtatctaagcaaaatcctacgctgttatcactcaactgctgaacataatatgaatgattgattgcttgccagcaaaatagtgccgccaaatccggtctctgtggcaaaacataatagctatcaaataaatatgttaatatctcatatgggtaggacgcgccttgattttcccaattttcatcatatagaaaatggatattctccaaaatattattgtcaccacatggaagaagattcagatggcattctttcgaataattctttgcgagtctcaaaatattgtccataataatacccaactatacttttctacatttattcttttctcacatcttcgccgatcataagatcgttgcctactgctcaccacggagaggtgtgtgattattcaagcagcgtagggagttaccgctcccagtatatcacaatttcatccagttttacagacgttttcttgccttcatcaccgcacaatacatcaatccgcctagcactccgccgactgtgttatagaagatgtctgataattgaaacgtacccaagcgaagcaataattgtagcatctcaatgcttatcgagaagatgaacgttatctttccgctttgccacagtatcttcttccagccgtttccaatcttctctccgaacgtccacatcactactgctgagaatggcatcatcatgattacgttctcgatgcactcggtggtcaaaagccaatcataaagtgaagaattcctgaagagataccgattttcaacaacacggttcgaacacccgctgccacaattgtatgtaatacatatacgggcataaaatactttgcgctatgattaaccaatccatctgtcttatactgctctttgctttgaaaaaagtatgtaatcacaagcacaaaaatactggcgaagataaattgagcttttgcattatcggtcggtgtactatagacaaagtaagaaaggatgcatgccaatatcaccatcccagccgctatcccatcagccaatttactttttttgaatggagtcactgtaatcagcattcctatgcaaaaccaaacagcacttgccatcacttttgcaaccaaatccggaatagccttatctgcaagccaccccacatagatgatcttcatgaaacacgctatgacaaccatgctgacaagcggttttcttttttcttttcctatcaccggaggaatcaggcaaaacagtaagaacagcgtatataaataccagtatggtgcgattggttctataagaagtgttttcaaaaaagggggcgccgcattgtttacatctgtggcaaatacattcttcaataaaagtgtaatagttgaaaacgttacatacggaacacccaatgcgagggcttttttcttaatattccctatgtgtttttttacattccattcgttcggagcagtagcctgatatagaaaaccactacaaacaaaaaaaagaggcacatggaatgtatataccgtttggatcggccagcaatataaaatattgttctcactgatccagccgcctgccatcatcgacatatagagatgccctataacaacaagcaaacaggcaaacatttttaaattatcaatccaaagataccttttgggtttgctttttaaggttgtttcattactggacatgaagcatttcctcgactgtgcagggttccctcagtcctttttctaagaaaggtgctgaaaatgtccttgctttttcttttgcactttcataagttccaattacccgtgccggaacgcctccaacaatactgcccgaaggaacatccttcgtaacgattgctcctgcagccacgatacaattatccccgattgtaactccataattgataattgcatccgcacctacatacacattatttccaatttcaacttttccaaagcggcaaagatactgatctgttttttcttcatgattaaacacagtattcagcgcactatgagttacaattcttacgcctgccgaaattgccacattgtcatgaagatagaccagaaacggttctgcgggcagtatattcgactggaaatagcaattttcacccactgcaccaaacattccgtgcttttttatgtaggccatcttcttccatccatcacggatcgtcagcatgtgaatctgccgccaataacggcgaaatttatcatatactttataaagtcccacctatcgctacctccttacttcttatagttcaacattccctttacattgaatacaattctttcccaagtgattttcttcctattaaaccacagtaccttcgcatagtatttcactttactgcggcggcttcttttcagaatcaagccaggagtcagctcaaacggcttatccgttgtagtatctgcataaatcagataatctttttgctcatcgtactctttaatggcaaaagttgtcgggcggcaccagtagtgcaagtacatatactcttcatcctttattttgccatgatccaaataatggcgaagaagagttccattgtgccatgtaaagacctgatgttcatttttgtacgcatcctcttccttaccccagtcaaggaagaagccataatcatatttcagcaggttggcgaaatcaatttttttatagactggaatttgaagtgcctcgtagatgtcatccatacccggctcatcgaatgcaaagcccttatcgactgaatagacatctcgatagtacatctttccttcaatatgtgttctatagcgagcacacacctcaggtgtattcttatagagattggagtgtccattaaaaccaactttttcatattgaccgagaacttcatccgtataaaatttgcggatattaccccaaaccagatctatatcacaatgtccccagaaatcgtagtcttttagctcgtctgcaaaaatctcaccatacgccggcttgaaatcgcagagcttatacgggcgctccagaaaaatcgggaaatcataaattgcctgaacctttttcttcatctgatcaaacgtccaatatgtaaccttcacattttccgggtaatcataaggcgttttgtcatctgtaaaaatcagccagtcaatcgatgggttacacttacagcttaacagccagaattgaaacccctttggaaactttccaaaaaaaggtacaacatatgtgttccatctggaagaatcttatttccaataactcgtgggtcaaaatccaatttgaacatcttttcatcacccagtttgttatctttcatcagttcagccttacgttcttctgcatccatatacatgcttcggaacttatacattttaaatctctttccattctttcctacacgttcctgtgcaaagaaaatcggtcctggtgatgctatgtaaattgctggagcaacaaatataaacaagattccagtaatcaagcatcctaccaaacctccggcaatatccaccagacgtttcagcatcaaatctcttgtagatgcatagttaatactggtagtcagtactgtataatctccgactttttctacaaactgctttttccccggcacgctttgtacctttgcaagatttagatgtactgttactccggtttccgtaaactgctcaatcagttcttttggatatggaactacaccggatgtcacaatcagaacttcatcaatccattctttgcaaacatattcggcagcattttccatatttgccactactttcacaccattaatatactttcctgtcatttccttatctataacagcaattccagcaatcttataccgggcataattatgctctttcatgctctctactactgcactccctacatctgctgaaacaacaagaagcaaggaacgattttcaccatcttccatttcctttctaagcaaatgtttccacagctctcgtaccagataagtaagtagaatatagataacgatattcagtatcaatgccagtctggaatatgcatgtccttcctgaagcataaacaaataaagcaataaacatgctccaagaattactccatgctgtgcagttacaacaaaatctttatagtactctcttttcaaaacgttttttagtgttcccattgcaaacagcactaccaaatctgctacttccataaagacagccatattcctgtaaagaattagccgatatggattaactccgtatccgcttaacgcatacgccagaacgaacgccacctgcaagcagatcaagtccaagatgataaaatccacatgttttatccatcctgtagaatcttttcgatacatactttctttcccctttattcatttttcagattccaaagcttaatcagccgcaaaagcaaatcgtgtttgaacttggacatgaaacctctcctttattcgttcaatatcaaatccctcaattattttaaatatcacttttccacttttttataaaaataaactgtaaattttagaaaagcctgtgtttgtgcggttttcatcgcttcacaggctttttacaactccaattttcgccgaaaaatcaacagaaaatcaacagagccgagaaaatcaacggcttcaccaattcacccccggcggcggtcaaatgtaaaaaaatatatatgtacctattcgcccgggagcagtaccgttagtgtcaaaaacgaatagtgttatattactatctcttttctgttgcctgttaatgctgtacggattagtatttatcttttcaatggcacagcgcaacagtgccgcacagtgtcaagccggggaaaatagtaccaacccgggaaaatctgaaaaattcgcttgaaaatgtgtaataaaatcgcttgtgttttctctgtgttggtggctctgcaccgttccgggcggtgttgtcctcgctggtgctatctgtcggggcttgctcgggcggtgttctgtctcggattccttgaaaaaatcggtaaaaatcctttttaggtaggaaggtagggcggcggcgcaacgccacgcccacagccccacaaacagcccacagaacgcccggaacggtgcaagggtacactacacgcctacagcacaaaaacgccgtacaacgccccacagaacgcctcacagcgtacaccaaccctacagcactaacacgacagggcaaaagaagaccccggcggggtgttatccctccggggcggtgtgcctgtgttatttcgattcgttcacagtgcatagaatatcatcagcgagttttacagccgcttttaatgcggttggcatttcaaaaagtgcggtttcgttgtccgggtcaactgctgaaagaacttttaaaaggctgtaaagctgtacggcggtttcctcaaattcttcacggtttaaaatatgtacttctttcatggtgtttcctcctattatgcgtgtttctgatttttataaactacatcggcgaaaatttcggtagctcgccgctgtgcttcctcgtttgcgtggctgtatatgttgagcgtaacagaggggttacaatgccccaattttttagaaacgctcacaacgtccgcaccgttcgcaatgctgattgttgccattgtgtgtcgtaatgcgtgggggtgcataccgggcaaattatacttttttccgaactgccttatatatgcggttatggtgtttgggtttaatatttcgccctcgttctgtgtgaagcaatagcccccggttgtttgtcctttactgaaatataacagcgcctgttgttttctccattccttgagaacctgtaaaacaggggtgtttataatgatttcccggcttttgtggttctttggggtgcttatatacacgcctttttctttggtgtattgagcatttcgggaaatggtgacttttccggtttgaaaattgatttcttcccatttcaacccggcaacctcaccccggcggcaaccgctgtcaatcataaacagcaccattgcacgccatttcagcggctcactgttcaaacactccattatataagcaagttcgctttctgaatatacgagggcttccggttgtatatcgtccttgcgtggttttggctttttcatgcgttgcatagggttttgagctatcacgccgttttcaacagcactttcgaaaagtgtgtgtaatgtggtgtagtatgtaacaatcgtaccatgtgcgagcggcttttttcctttttccgctttggtggtttgtaaatcagttataaactgttttaccattagaaaatctatgctttctaattttatttcaccaaataccgccgccgggcgttttaatgcctgtttatagctctgtattgtggtagctgatagcgtggcggctttttcatttatgaacagctccacatatttattaaatgtgggctttttctgttcttccgctttttcctgttctgccttttccgctgtttccattgcgtgggctttctgttcttctttggtgaggatttcgccacgattgcaagcggcttcaaactcgcccataacttttaataactctcgttctatggctcgtttgctccacccctccgggggtgtgaatgttgttgtatagggtgttaactgttttcctgtcagtttgtcacgccctcgtgatacttttatttgatagctgataatttccccggctttatttttccgggctgtataacttgccattgtgccgacctcctttatttattcattttcagcaactccgcaagaataaccagcggtaacaataaaatacaaaataatataaacattgcgattgtgttaatctccttgtttttatggagtgagtgcaatataatatattttgcactcgttccgggtgtatagctcttttttcttttatgctgtggcggcgtttagaaaaggggctatttttataatacacagaatcttttatagcttgtttcccggctgtattcggtgaacaaatccgggtatactttcttgaatccggtactatcaaaacgacagcttacaaccgttttattagtggcttttgccgccccttcaacgtgcatttcatcgtttcccatgattgcaagaatatccgattttatagaatcgttcatagcttgcaattcttcaattaaacgcttattttcccggtattcattgcacaaactttcaaatcttttcatttttcaaccctccataacgctataatcatattgtttaaccgttcccaacgtgcacgccgtgggcgtttccccggtgaacctgtcaaccgttgcaaccgggatataaaacgccgtataacgcccggtttcgttgtcggtgcaattataaatttcaaaagcgttcacggctttttcaaaagtaacgccgttataaccttcgaaattcttgtttacgtcaatttctaaatgccacggcgtaaaggggcgcatattcaccgggcaaaacagaacggttaaaccgttgttataagccgcccgggcttgctttttcgtgatacgttcccacgttttgccgttgttcgtaaagctgtatttattcataaataacgcccccgttcaatttacaaaattctttcaaaaggttttcaacggctatttgcttttcttcaaatgggcgtttgtcttcccaactcaaaatagcccgggctttttcctcgtattcactaattttttgaagccttgcacccggcatatttctataacctgtgcaaatcgtaacgccgtaaacctcgtaaacgtcaaaattccaaccatacacgccgcaagtgtatgcaatgggtgaatgattgttcagcaaataggacaaatcacaatacccggcgcatttaacattataagaaccgtttacaatagcttttcttgtggttttaactttcattttctttccctccgttctattatctgtaaagtgtaccgttatacgccgccgctttttcttgtggcgttggtttgtgttcaagccccataaacccggctttattcaaaccacaaaacgcttttatatgtttcccggtggtattactccaaccgccccacaacctaacaagcgaaccatttacaagccgctttataataggggtgttatagctgtaaagcgtttcattcccggcgttgtcaatttcaacaacggcttttccgtaaaaacttttttgtgttccgtttggtgtcaattcgtatcttttcatttttgttacctccatttattcgccggtgtgtatttcgtttttctatggtttcattctacactataatgcaacgaatgtcaacaccatttcaaatatttttattcactgtggtttatttcgttgcattataatgtagaaagaacttgcattttccgctcaattctgtataatagaattagtaattccgaaaacacgaattggaggtaaaattctatggaaaatatcagaaacgaaatcaaatcatatattgcggcttccggctggtctttggtcgatatagtcgcaaagatgaacgaaagtcgctcggaatcggagcagaccacgccgcagaacatttccaacaaattgacccggggaacgataaaatatagcgaagtgaaagaaatcgctgaaattatcggcttcaaagtcgtttgggaaaaacaggcatagtcggaggagtaacccatgaaaaaacatatagtcgcaaagtcgaaagtcgctctgatagtcgcttgcttcgtatcacttgcagtatcgttgacaggctgtggcggcgaaaaggagctaactaacagcgcagagtacgagggcagttccattgaactgacaggcagtgaaattgagaccaccgataccgggaaagaggtcttgagagtatcagccacttacaccaacagaaattccgaaccgcaatatgcgttatctgcatttgctgtaaaggcgtttcagcatgataccgaaatcaatgacctgtcggatataaacggtagtgaagcggctcttattcaagaggtcaaaaacggaaagtcgttatccgtcagctatgtttttgagcttaccgatgaatccccggtggaagtctttgtatgtaccccgacagccagtgaagaacatattgcaaaagctgtgtatcttgatacagagcaatcctcgagtgagaaaaccaactgatagacagaaagccccaccctataccgggtagggcttttgccatatctgaacgcttattctgtcggttcgtctttgacagggggcttttcatcacccagcaagtctttatactcggacagtttgaacaaagtcagcatatccgggtgttccttcactacatcattgattttcttaatgatagtgatacagtctgccgggttggaaatgtccagtcctttaacgtctctcatgtaccagttaattcttgcgagttcgcctttggagagatgctgtttttcagctttcacttcctgtaactggggagtgttatcgaacaggtcaatataacgctggtatacagggtcgtactgctggtccttttcgtcctcgtttacggtgtagaaagcatggaatcgaatgtccatgttatcccacttcttagaaaactcgttgcaagccgccaacaggtagttgctcgcttcattcagcgtatcgaacatttctcggcaatcgagctgtacaggcagatgaagcgtgataccgttctgctcactgatagcctgtaaaaccctcatggactgatagttctcgaagaaaatcgggagaatgtggtgtacctcaacggaatccacatcgccacgcatttgcaatgccttgagaagacgaagctgttcgtcagtaggtgcggtacacagcatatcgccgattttctcaaacttggagcttgtcagaatggcaatatcctgtttggtagcttcaatgatggttttcaccatgtcattgaactgctgtacgagcttttctcggcgttcggcaatcaccttaccgctccacacatctttcagtttgtcgatattcgcatacaaatcagtacgctcattggtgataaacacatagagtgactgcatttgtttctgaatacctgtgaatgtcagcttcttatcagcgtgtgtgctggtttctttccatttttcgttcagctctttaatgccctcggacaactgctcgaacgatttataatctttaatatcaaccttcatttggtgttcctcctattttcaaattgttattgtgtgataattaccgggtgtcagccagtcagtagggggagtgttccccctaccgaagcccagcttcctcccagcaccgagcatgagtgttatcatgctgaatctcctttcccgggtagttacccggtgaagctgaaaccgttcgcttccttctgcgtggtaacagcgtcattgattgtacggttgccgacctttacgatggtctgttccttcttgtctgcctgtctctcggttgcaacaaccatacggttgatagagctttccatgaactcacgatagaagtccctcatatcctcgtacatggagctttctgccgtgcgataggatttctgattctcctcatagacagactgtgccagtctgtaagaggggtcatagccgcttgcggaagcgagggcaagaccatcgtttatatcagccgttcccaccataacagcgttgataacgccatttgcacaggtaacaaggtcgtgagacatagactgccaatatcttgcaaactgcgccataccgctcacgatggagctgtgcatgacagaagcaagctggaatcggttcagcacttcggtagtaccatttacatgacccaccagctctgcaccgctctcaccagcaacgaacatagagccatgcgcccggttcgtgccgccagcatatttcggcattgctttccacatattcggagtgatgataccgccggaagcgaacatcttcacgccaccgccagcactgacaacaccgccgccggataagccgaagaactctttgattctacctttccacttgcttatcagattgacagttacatcaacagcaccgccgatttgtgtgcgtacccacgaagcaaccgtactccaaccgtttctcgcaaggctgacaccttgattgataacgccacttccgaagctccaaacccacgaacttactttagaccagccactcttgataaggctgattgcctgtgagagaaccgggatattaccaatccagcccttcacagattcccatttctccttcgcaagagcgatatactgcgaaagtgtaggaatgttaccgacccagtttttaacggttgtccatgttctcttagcaagggcgattccttggtcgagagtaggaatgttaccgacccacccctttacggtagtccataagctctttgccagcttgataccctgttcaagaaccgggatattaccaatccagcccttcacagattcccatttctccttcgcaagagcgatatactgcgaaagtgtaggaatgttaccgacccagtttttaacggttgtccatgttctcttagcaagggcgattccttggtcgagagtaggaatgttaccgacccacccctttacggtagtccataagctctttgccagcttgataccctgttcaagaaccgggatattaccaatccagcccttcacagattcccatttctccttcgcaagagcgatgaactgcgagagggtagggatttttcccacccagtcctttacagaagtccacaggtgcttcgcaagagtgataaattgctttgcaataggaatcttaccaatccagccggaaactgtgtcccagccgtcttttgcaagctgaactgccgtttcaaccgaaacaccgtcctttgtttccgaagaccaccaattcgtgaccttattccacaagtcagaggtgttgttcttaattgcgagagcaacagggttctttgtaaaagcattttttacaggggtgatgatatttttcttcacccacttgccaatgcctttgaccgtctcgcccagtccattgaatagcccttcgatacagaactttccaatttcagcgaataccgtagacggatagtgaataccgagagcttccttcacgccatcgacaaagcctttgataaaatcaccaatagccttgattccagcgttccagccctcaaccatgccgtcccataccgccttgccaacatcgtgaaaccatgttccgatgtcagacagcttctcgggtagtgtctcggtgaaaaaggttacgaatgcttccgaaatggtgttccacaactcgggaattgtctgcgtaaagaacttcggcaatgtctgtgtgaagaatgtggaaaatgcctttttaaccgcttcccatgtagaggaaaaccagtttggaattttcaccgtcacaagctcaattccgctctttactgcgttaccgaaccatgttccgatattctttcccaatccgtaccaatcataattctcgataggtttccacaggttagagaaaaactcggagaccttggacggcaacttctgtacccacgttttgaatttgttccacatacccggaacggttacagtgaaaaacttattcagaaatgtggtgatttcgctccaatgctctttaatagcaatgattccgtcagtcaccaaaccgacagcgagaccaatcagcgcaccgataccagctcctatcggaccgccacaagcaccgataatagcaccgataccagccgccgccgcagtagagccagccgggataagcagaccattcagccagttcagaccattcttcaatgcgtcataaataccagtgaaatatgccggaataccagcaatgattccaccaataccagcaccgatagccgcaccagccgccgttgcagtcccgagaccgagattgctcgccgccgtagtcaatgccgccgcaatagagctatctgcaaacgaggacataatccagccagcaattcctttacccaaaatcgaacttccaccgatggtaagcaaccctccggcaatgatttgagcaaagttcattttgttcagctcgtacttgattgcatcaataataccagcccattcgagggcaacgcctgtgacaagcaagctgataccgaccgtgatagtgaacgcattatccaatcccaaattcttgagattctgcatatatttcaatgcagaaagcacaccctttgagattttccatgccgccagccctaatgcaatagcaccgactgtggttaagattcgtcccaaccgtgtatgtaacaggtcagacaacgaattgatttcctcattgagaccgagccattctttcagcttatcgacaatagcgtcaatcttagaagaaacagcattgccgagaaaatcgtatgtgggaaggtcgatacccaaatcgttaccgccaataccagcacccgaaccgcttccgcttccgctggaatcatcgttcggggagataatgttcaattcgtcaatgccgagcattgcgtttttcagtttcttcgccgccttggtagcgttacccagtccgtcagatacatcttccaaaccgcttgcggtgctaccaaccgaagaagatacatcggagaacatatccccaaatcggtcagcattgataccgaacaatccggcaatcgtaacgataagagagcgcaaaacctttaccactgcaattacaggcggtaaaatggcattgagcataggaatgaacaggttgccgattgctcttgcacactgcgtaacctgtgcctgtaaaacacgaagctggttcgccggagcgttcagagtacgagccatatcaccttgagcggtagttacctgtgtcataattgcgtagtaacgcaactgcgacttttcagcctgtgtcatagcagagacctttttctcgataccgagagcaagagcttcctcttgcagtcttgcaacagacaggtcgtaacccagtctacgaagcggctcaagttcacccgagatacccgactgtaacttctgcattgcgtcctcaaacgaaatgttgaagaacgaagaaatgtcgtagccgagctgtgtgaggttcttggacatgaggtacgctttatcgctcgccacgccgaaaccgctgataatggtattgaaagtaccttggttacgcatgaactcgcccgggtcgatacccagtacctcaccgacttgctctgcatatttctgcgcttcggaagcgtactcgcccaacgccacattgaacaggttcatatcctcaatgtactggttagaggtgtgaagccatgaagcaatcgtatttccaatgctctgaaccgctacacgagccattcgcagtttcgcccacagattgatatagctggtgcttgcatggctgtttgtctgtgttaaagagttcgtagccgtaaccactcgccggatattcgtgggcaatcgggtaaacgccgtagccacagtattgagctggtttgccagcggagcgagtgcattggacaactgctgaatctgactggtaaaactgttcaaatcaagaccagccaacgattttgccacttcgggtaacttctttaaggcgttaaaggtcgagttcaacccggttgctttaccaatattccccagcggcgtgagtgctgtcgagagcttaccgatactggaaaagtccacgccattcagagaagtagcggcactgccaatattcttgagctgatttgcaacagaggaggagagcttaatgctccccagtccattgagcttcgacaaactggtggccaacttgtcaattttatcagcggaagaaccatcgacagatttcagtgctgaatcgaggtttcggatttggttcacaacacctgtcagcccgatacccttcgtagcacttttcagtttccccagcgtggaggtaagagtgtcaatacttcttgccgctccatcagcagaggactgtacttcgagttgtagactttccacagtgacatcactcataaaaatccctcctttctatgggatagaatcgaatgattagatacgcttccacgtcacatcactgttattcttttcaagctcgtccacgaactcgtcaataacaaggctgtacatttcagcgagagagttcaccagcccagccttatcatcaattttcgagaaaatctcgttaatgagctttctcttgctaaaacgatggttggcgataaatgcaccagcaaaaagctcgggcagaacagtcagcggctttgtaagtacatcttctgcaacaaagccccggcgttccatttcctcaacagatttgcgggtgtattcgaggacatataccttgcccccataggtgaaagtgattttgtttgccattttgatttcctcctttaatttttccgggcggtatgcccggtttatctccacagacagcggttaaatcaagccgctatccgtagcaaactgtttttcaagagccgccaaacggattctcttttccggcatagcgtcagcacatttgaaaccgtacagacctgtattcgtgtcccggaattgatacgcaaacacaaattggataaatttcttatcttcttcggactgcttatcaatccaattccgtgtgaacttgaaccaatcaagcggtgtcttttcggtcacttcaatgtgtcgtactaccatgcggaagaaatgttccaccaactcggtgtaatgttctctgaacctcatacgcacattcctcctacttgccggacttcggattttcgtcaatcaagccaccagcgacagcaaagcggcgttcaagctcgtacaatcgttttcgcttgattccgtaatcttcactggggttgtaacaggacagcccttcggcagtgctgtaaaaatccgaaccaaacacaaaacggataaaagctccatcttcttcggataaaccagcaatccaatttgtgctaaattcgtaccattttctcggcaaccctgtgtgcgcccatttgcgaacgacaacatggaaacactgttcaacaaaggttgtgtagaactgcctaaaaaggattcttcccatacctcacacctccttccttagtcctctgccggaacatcagccatatagcgttttctaatgtcctcggcactgtaagcggcttcttcctcatatcccggtttattcggggtgagaatcagttcgtttgtttctctgaaaccgtacatagctttattgaggaaaatggaaacaatactgttggcattgttcttcaatgcggactgattgagaacatcggcacacaggtcattgaacatttcgagccactgtgcggtttcggtatcagatttataattgcgccaattccgcaatgctctgtcagaataccccagcgaacgagcaagcccgagagaactcgggaatgtgcctgtttcttcgcaagctcgaagataaacaatcgttcgagccttgacgctctcaatatcttcgagagagaccttttcttttgtggcggtctctaccaattcagaggtttttgccgccaccagttcccggagcttatcctcttgatattcgccggatttttccttataaatgctgtgtcctttttccagtgcaagccctttttccttgcttgcggtcatgctctcagtcatttcaagataactttgagcggggttctttcctgtcgtagacattattcgttttcctccttgtcttctaatgcgtcttttctcaaccataaaaggcgagaacgctttttgccgcttgaattagtaatccatttggctttagtagtctgattcttgtcggtttcaattagcttgtcgattgccaactgctgaaatagggctgtctttccgagcggaaaattcaaatcctgtgcggcatagaattttcgcacttcgctgtaaatcgtgtcggggtagcagtagtagaaatactcatcaacataacccacaggtttgtacgaaggacattctgctgttaaatccgagaaacggatttctccccggtctaaaagctccttaaccgcattgagaaacagcttcacaggcttttcctcgtaaatacggcgattctgctctgcggacagcgcaaggaaaatatcccacgactgcgccttgagtgtgtcactctgttcggaagtaagcacattgacggattccaaccaatcgcacataacagtcataccgatttgcaaatgtgccacggcaaccgccaaacgtccgtgaccgcctatttgggctttatcacgcaactcgagaaacagcggcttgagcttttcggcaatggtgtcccagtttgcaatcacatactgaatgtactcggacatacactcgttcagttcacttgctctctgctgtaccgccgtcagttcgggcaatttcacatcacccggtctcaactcacaggagatagagcgagcaatggcactttcgcctacattgctgtatgcttcctctgctgtgataatcagattgcaaacagggcggtaaaccgatttgagagaaccgttggcgttcattcttgctcgtccggctctgtcaccgatagctcgtgccacactctgttccatgcgctccatttggtctttgacccccttcgtggtggaagggattctatcatcgagcagtgtcaatgtggaattgagcagacccatcgccttttcagcggcgttgggtgtgtccttgaaactgataggagcggattccgtttcccggaatataccgaaaaacgaaagaaacaggtttgccacagtggacttttgagagcctgttttaccgacaaagtacagaatgaatcgtggttcaaagccgatttcctgtaacatcgcattgagcggtgtcagaaagctatatgcgagagcagtatagataagcggcttcggtgcaaccttgggtaaatccatcaacagtgttttataacggctgtcatgccgctctgccgtgaaaccgtaacggtctaatttcccctccatctgaacgctgtacccatctgtaagcccctcggcggtcacactgttatttccgttaagaaacactcgctgaccgtcaatcattgcgtacccggtatgctgataaactgttgtgtgcagagcgttttcacactgaatctgcattgcttcgctgtaacggttttttgcacctcgctcgaggaagatacggcaagccgctccaaacttaatattgggagtttggctcaacacatctttcagtgtgaccgggacaacaccccacattcgaccagctctgcgaacatcgaaaagcaactcctcggtctgttctacgccgttatcgacaatccgctgttccttaagaatgggtgtgtggttcgcaatagcagtttcttctattccaaccacttcccgggtgtccttactcaaaatcggtgacttataaaccaatgtcccatcgggcttcgattcgtaagtctcgccgattttcaaaatctcgggttctttctccatcagctcacaccctcgctttcaagacgttccaaaaggcgaggtacattcacgaagattttcgctccattcttaatatgagggagcttcccggctttcaacagcttgcgtaagtaatactcggacaagccagtggtcttcacagcgtccttcatcggctgataaactggaataatgttgttattcatttgacttgccctccttcctcttggctttcaacttttcacggtatctattgcgaatagccctgtctttttcgggatttcgctttctccattcccgcatataagcggcgttctctgctctaatctgtttacgagccacttctaatgcttcctgttccgtcattcttgaacctcctttccggcaacaaaaaaggtgcgctatcgtcagagaatttaatctctgtgcgataacgcacctatcatttcaacttgttctctccataaccaatactgagagcgtgaccgaatcactgtggttattttgttgttaccaccattatagcaaatggggcataaattacaactatctgatacggacaagaagttatctgaatagcgtaattttatctgattcagatagcaaatcaacaccgatagtattgaaaataacacgaaaactctttttggatttttcggaaatttttgaggagggactttctacatcattggaatggtactgttggtacttcactggtactactgccgtgtgccattcaaaagattgtatcttatcttgattgtgttgctcggtaacagatagaaagatagatataatattatttgtttttggtactaatggtactgtaaattaaactataccctctctctaaaaaccttttattgcttgagggtattcggactactccctcggcactttaagcggggtatatatccccctccgggggggggtatctgttgccgctggtgtgagctgttcccggctggtgttggtgtggtgggaaaatcaacagaaaatcaacacgccccaatataaacccattcacactcgaacgagctggaacagcaagccacaacaggcgatttacagcccaacatatagaaaagccttgtatttgctgtgttttctcgcaacggtatgagccggaacagccccgaacaccccggaacgaaaaaatactattgataatttataaaaaacattcatcacaagcgcctgcaaggcgtcttcatcgggatagaattccatgtattcctgccctaccttggcttcaccgtctatggtgcggatctcggaaacatcgcttttactgagtaagtccgcgattttagaaagcttttcagctgtgcagtcggaagtaagataatcgctgacctgcagaatcgcattcgtagcgaaccacgcatcgctgtcggcttttttcggttagcttcttttgcagtgctataaggtactgacgctggcgctccattctgcgcagattagagctatcctctaacccgccacgtgtgcgcacataagttagtgcatgattacccattaatgttacggtctcgccttgtacaagcgttgagtcaatggaggaaaaatcatccatcacttccacctcgacgccaccgaccagatcatttaaaattgccacaccatccattgtaatggagatgtagtggtcaataccaacgccatacagcagattggaaacagcctctgccgtgtttagacagctgtcccgctcacccgaaccgtatgtatgcgccaacgcaagctgaccggtaaatgtaccggccacatcgccccgaacgcccaagatctgaatcttcgtcatcgtatcgcggttcagctggatcggcgtgcaatcgccggtctctttgttaatcacgagcagcatcagaaagtcggattgttcgttatttaaatagttactttcttctgtctccgcatatttatcgagacccatcagcagtacggtctcaagatcattgcggcgcgcataccacccgccgttataatacgtcagctcccgcgtatctccggcttcctcaagcgcagaggaactgcttccctctgcgtttgaggaaacatcaggggcagtatcctgtccctgattttcatccaaattccggagtaaaagagcggctgccatcaaaagcatgaggacggataacccgactgccatgccttttaagacgcgcatatttacccgcagcttcataaattagcccttacgcttcttagaagcaacaacagagccgatcacagctgcacatccgaggcccagagcagcaacgcctgctacacgcagaacgccgttgtcactggtctgcggagaagacggagcattggtgctcggcatcgttgtgtcagcagtctcctgcttgtccacaacaaaagcaaccggggagaagctgtcaaacgttacgtcgaccgtaccgtcagcattctgctttacgcgatccttcgggatgatctcccagttggagccctcatagttgtgcagaacgatcagcgttgcagactgggaaagacccagattgaagcgaacggtgatagggctactctctgctgcggcacccgtgacggaaacgtcgaacaggtcacgaacaacgagatcctcaacagaagcctcgctgccgatctccttcaggtaatcgccgatggacggtgcgatgtcggtgagcgttgcagcagccttaatctgctcgtaagcagccttcaagccgtctgcaatagccgcatcagcgctgtctgcagcggaaaccggagttacaataacttcgccgtctgcaaacgcgttaccgtcggcatccgttgcggaaacaactgtcggtgcacccttctgctcaacgctaggggtaaagccagcagcaaaagacggcacagcaagagcaactaccagcaggattgccgataagattattacgattttcttcatggttaaaacttcctttcctaaatgggtgattagccaccatttattattcgacctcatcgacgcattttgcgacgacgagaaatcgtctgtgtgaattgccctggaggcaggtggacaggataagcagtttatcctctggggtaacggacacatctgtaccgtgctgcgcaccgatctcacgcacatcgaaaatgctgttcaaaaacgcattgtatcggcgcttgctcgtgaaatcatacgtgtacaaaatgtggcggttatcatatggcacagctgcaaataccttgtagtgcatttccttttccggcagatacacggtgatatcgccgtgctccgttagcgcattcgattcggaatagacctgctgcagcttgccgaacatcgtgccggcaagcatctgatgcccataaagcaccgtagcggggtcgtccatttttccgtcgttataagagctttcggaaaagattgcccccatggagttatcgtttccgtcgctgtcgtgcgtcaggtagtaatcatcgtcccccgcgcgctgcaagatcggaaaatcaaactccgtacccggaatgtacagccaagcgtaaatatccgggttttctttctgaagtgacgcaaagtcaatcggactcacatacggcactgcggaatctgtggatgcggaagataccgcttccggcgttgctgtcggtgtaaccgtagccgtagcttctggtgtggggtctgccgtttccggctgttttccgccgcgaagcagaaaaacaccgagcacaatgcaggcagcgcccagtatcgcgaccaaaatgatcagtgcgcgctgtttcacaggcgttccccctttcctgaaagatccggcaggtttcgttgaaattcgcgccacacatcgggctcaacggacttttgaatcacttgtattgcttctccgagtctcggaggccttgtggtcatgttgtggcagtcggagcccagcacatcaatctcgccgcgctgcagcatcttcactgcttttcgctttgtcctccagcttaaaaagaacaaagcgttgcattgcattttcacgccctgcgcccgtaacgcctgcaatgcgtcactgttgtgaaacggcaggtagcgctcaatgtgtgccaataacacctgtgtgtcccgtcggttttgaatctcggccacttcattggccatgcggcggctccactttgcaaaaggcatttcaagcagcagtatgttcgtgttttgcagccatagcgcttccagttcgtcaatacgactgacgccgtcgaagtaacaaacctctgcgccaagataaacacgcggcaaacccggcgttaaagcttccagcagctgcgcggcacaggcagcccgccgctccaaaaacttctgcgggctgtactgcgaagcgtaaaaatgcgacgttgcagcgatttcggtgatgccctgctctgcggagatccgcaaaagcttcaggctctcctccacactgctgctgccgtcatccatcttcggcagaatatgggaatgaatatcgagcatgcattatttctcttttccggtcttatttttctcaccgtaaccgtagccgtagccatagttgtaatttttatagtattttttctttccctccaacgctgcgttcgtcatcacgaagcccaagatcttcgcttccgcaaagtgcagctggcgcacggtttctgcgactgaacggcgtgtagcgtaattctggcgcacaacaagcagcatgccgttcatgagcttcgatacaacgagcggatcggaaacagccgttacaggcggaagatccaacaggatataatcgaaatcacgactcagaacatccagtgtaatgcgcatctgctcggagccgagcagctcagacgggttcggcggtatatcgcctgcaggaattacccacatgttcttgtgcagttcgcagcggctgagcacatccgcgcccgtacactggcctgcaagcaggttggaaatacccttctttgtctgaatgtgcagacgctttgtgtacgtaggcatacgcatatccgcctcaatgacaagcacaagcttgccggcttccgcaatggaatacgcaaggttcagtgtggtggtgcttttgccctcgccgcgcacagaactcgtcattccgataattcggcatttctgctcatcggaaagcgcaaagtcaaggttcgtacgcagaagcttgtatgcttcggaagctgcaaagtttaggttttcaccgagcattgcgccgtactcgtagtcggaggctgcattcctatattttctcatgcgttttcctccttcccacctttgctgccatctctataatagtaatagttgcttttcgaattcttttctgtcagatccggcaccacagccagcagcggcaggtcaaacgtcacgcgtacgtaatcttcgttgtgcacaacatcgtccagaagatacagaacagtaaacacgccacagctcaacactaagccaagcattgcaccgagcatcgtgttcttagaaagactcggcgaagttttcttggacggcaccacagcgtaatcaacgatgcgcacggaactaccctctacgatgtctgcaatgcggttcggcagcagctctgcaatcgtgttcgcaatcttctccgcttcttccggactcgcgctcgtcacagagatggaaaagacctccgtggagttcacagcgccggcttcgatcataccggaaagctgctcgtaatcatacggcagatttgcttccttaatgacctcctccagtgtgccgcgggtcttcaaaataaccatgtaggtctcaacaaggctctgcgccgcggttaagtcactcaggttcacctgcgtacttccgacggaaatggaactgttgttcacatacatcatggcgctcgccgtataaagcggtgtgatgaagagctttgtgcccgcaaatgccatagcggctgtgataagcgtcacaagcacaatggcccatgctttgtgccacagggcttttgcaagctgcagcagatcaatctcagtttcgttttctctgttattacccacttgttttccccattccaaattttcttttttctgcacatctgcgaacaccctatatataaaaggaatacattcgttttcccatcaacgaagggaagaaaatcagttgcacaaatttatccttattctactatatttcgacgagaaaatcaagtgtatttccgctatacgtattaacatttatgtgcaaacatgcgacccccccccgatttttttggtaagtttgaccagcttgacaaagttcaacttaattttgtgtttttcggcattaactccctatattttgttccattactcaaattcatctatttactttattgaaattttaattctatattttttgccattaaaccatgtgtttcctgccgcgcgctgcattttcagattactgccttaatgtgtgtaattaatttgcatgtattttttaaaatactatccagcctcttaaaataagacgaatcaaagttgaaacaaaaatcacttctatttgccaaatatttgaatttcatttaaatcctgcgtgattatcattcacctaatattgctctttgaattcacaggcgcatctaagctttgcttttatatgcattttttataaagtttcaatactatgagataaagctaaatttctatgctccactttaaatccatcaaaaaaattcacccccctaaaaccagaaaaacgcgcagttcggtttttcatacggatatacccccaatactgggtgtccagtattagggggcatatcctaccaactgcgcctttttcacattcgtatattttgttttcaagaaatttctcggcgccgcttttatttatactgacggataaaataaaaaatcccaaacctctcatttctaagaagtttgggatctccgtgtggtgccggtggcgggggtcgaacccgcacgatgttgccatcaacggattttgagtccgtctcgtctgccaattccaacacaccggcttaacaaaatttattatacgttaaaccggtggaaaaagcaagtgtttttttaattatttcgaattttattcgtttgcgggcacagaaacgtcaaaataacggtactttgcttcgcagtccccctgcgccgtaaggcccacaaagcagcccgtaaacgtgcagttcatgcactctgtggaaagcagctgcgtgctgccggtgccgatctctttcatctcttccccagctttacccgcaaggaacgtatagcgcagacggttggccttgatgcacagcgtcagcgtgtccgttcccgggaagaacacaggctcgctctcgatcatcatatcaaccacgcggcggcgcagcgtgacctccataccgccgtttttacgctcggcaaacagctcatagtggtgctcgttcgtgtggaaaaccgtcatgcccgctttaccgtcgccggaaagcgtcatttcggtcgtatagttcaaaccaaactgctgttggcgcacaccgaagaatgtgaccgtcttcagctcgtcaagcgtcgcctcactgccgcacagtgtaacgccgctcttatcaaatgtatacttcatgcggtcgggtgtgcgcagatagctccagcgcggtgcaggtgcagctgtgttgaaatcatcgtgccaactgcgcgcaacacgcacgtctccttcaccctctgccgtcatgataggctgaatctccttgccaccgtatacgaccggccagccgttctcatcccatgtaaccggcgcaatcatcgtctcgcggccggtgtgatgcagcataaaaacagacgggcgaatgccgtgaaataccatccaccacttaccctccggcgtctctacaaggtcggcatgtccgagcgcctgaaactccacgcggtgtgcattgcggtgcgtgaggattgggttgtgcggacaagattcgaacgggccccacacgcctctactgcgcgcaatggtctccatgtggccgtactccgtaccgccctcggcaatcatcaagtaataccaattgccgatgcggtacatgtgcggtccctccgggcatttgccgccggtaccgtaccaaatgcactttgtctcgctcagctttgcaccggtctcaagatcaatctcaaactgtccgatgcagttgttgccgttttcgtccgtatgtgtaccggtgtaatacaccttgccgtccgcatcccagaacaaagacgggtcaatgccctgatggtcgatccagatcgggtcggaccactcgccgcggatgtcatctgtccacacaaaaaaattgccgccgcctgtcacattcgtcgtgatcatatagaatctgccgtcgtggtagcggatcgtcggcgcaaaaataccgccggaggtgcggcagtccaccagcggcaactggctttcgcgcgtcaaaacatagccaagctgctcccaatgcagcaggtcacggctatgccaaagcggcacgcccggaaaaaactcaaacgagctgttgacaagataatagtcttcacctacgcggcaaatgctcgggtccgggtaaaaacccggcaggattggattttcgtatgtcatgtgtactcctccaaatttaaacgtttgggcatattgctcttacttctttttcactctataatagtatatagtctgcgttatcaaaaagcaatgcggataaaagaaaaacccggataacttccgttatccgggtactggcggagaggatgcgactcgaacgcacaatgccttgcggcacaccacatttccaatgtggctccttaccattagaatacctctccaagcgacgggtattattatagcgcatgtctttcaaaaatgcaagtgttttttcaaaaaaaattcattttatttccttttaggcaatattgtgcgaaatatttgcacatttatatattaaaactatatagcaggctgtatctttctcgttcaattgtatggctcacgtatattttatgtaaaattcggcgaaaacagggtgctttttcctctcgggtttgctataataaagtaaatatctcaagaattcttgcgggcccgctttcggcggcgctccgatttagttgttctacattgaaaggcggtgctcatattgaataaaaaactttcgggcgggccggctgcggtcatcgagatcggttccagtgcggtacgcatgcgtgtctcgcagttaaagcacggcgagatcgaaatgctggattctctcgaataccctgtgttcttcggccacgaggtcttcaccacgggacgcatcagctttgaaagcctgcgccaactctcctctatcctcacaaaattcacaacggcgctggagggctataactgcaaaaacgtgcgcgtggtctcctccaccgtgatgcgcgaggcggaaaaccgctcattcgtcatcgatcaactcaaaattcacaacaatctgcacttggaaattctggaatacagcgaagaaaaagcgctcatctgctccgagattatccggcttttaaaagaagaaagcaagattgaaatgaaagacgcgctcatcgcgtatgtcggcacgggcagcatcggtgttgcgctgtatgacggcaaggcaatctgcacctcgcagaacatccccatcggctctttaaagctgcacgatgccctcggtgtgctcagccgcgagtgcgacgatttttaccccgcggtcgaagaatatctcgacatcattttaaaccgcgtcgatattccgaaaaaagacattcgcagcatcattttgacgggttccgatctggagcttgtcgcctccgtgtgcggcgccgaaaaaagcggcgacctttacaccatctccgcaaagaaaatgcacgcggcgtataaggaaatccgcatgatgtcctattctgccatcgcacgccgctacaacatttccgaagagcttgccgaaattctctacacagcgctttctatatataccggcatgctgcgcctttcggacggcgtgcagaaggtcatttgcccggatatcgatatttgcgatgccatcacacgccacatgctcgtgccgggcgcgcaaaaagaatacattgcgcaaacaaacgaaagcgctattgtttccgcaaaacgcatcgcggcaaaatacaactgccacggtgcacattccgacgccatttcagagtttgcatgcacgcttttcgacaaattcaaaaacctgcacggtctgtcaagtgacaaaaaaatcattttgcagctcgcgtccattctgcacagctgcggtcaatacatcaacgtgcgcatgccgaaccagtgctcattcgacctcattaaaaatctcgacattttcggcctcacgcacgagcaaattctgctcacggcattcgtcgccggcagcgatgagttcaccatgccgaatgttgccgatgcaggtgcaatcccgatgacggaagaacgccgtttggaaatcttaaagctcgttgccatcttccgccttgcaaacgcgctcgataaatcgaagcgccgtaagctgcgcatcagtaaaatccgcattacaaacgaaaagctggagatcaaagccgtcgcttccggcagtgccctgctcgaaaaatgggcgtttgaggaatgcgccggtctctttaaggaagtattcggtctcagccccgagctgcaaatcaaaagcgagctgctgaaataacgaaaggacggaaaccatgtctgataaaaagaattactattataaccgcgagctgagctggatggacttcaatgcgcgcgttttggaagaagcccaaaagaaagataaccccctcatggagcgtttgcgcttccttgccatcaccggctccaaccttgatgaattcttcatggtgcgcgtggccggtgtaaaaagccagatcgcctcaaactacacaaagccggatgattccggcatgacgccgaaggagcttctctcggcgctcgataaaaaaacgcacgcctttatggaaaagcagtattcctgcctataccgctctattttgccggtcctcaaaaagcaggcggaaatcgagttccgcacgccggaaaagctcacgcacgagcaaagagcctttacggacgagtattttcatcgcgtgctgttccccgtgctgacgccgctcgccgtagacagcagccgcccgttcccgatgctcgcaaataaaagtctgaacctcgccgtgcgcctttcttccaaggaaaacaagggtgaaaagtgctttgccgtcgtgcaggtaccgtccattctgccgcgctttacggagctgcccgcagacggcgacacacgctgcttcatcctgctcgaggacatcatcaccgattatcttgaggagcttttcgaactgcacgagattaaagccgtgtgcccgttccgcatcacgcgcaactccgacctcaccatcgacgaggaagcggacgactttatgtatgagattgaaaagtccatcaagcgtcgtaagcgcggccgtcccgtgcgcttggagctcttgcagcacaccgatgaagatacccgcaaatttctcataaaagcgctgaacatcaatgaaagcggcatctacgaggtgcagggacccattgacctcacgttcttctcgaaatttgcgaatattccgggctgcgaaaaactctgctttgcgcccattcgtcccaccacacccccgggtgatttcttcggctacaccgatatttttaaggccatccgtgagggcgaccgccttgttcaccatccatatgagacattcgactgtgtcgtgcagttcatcgcacaagccgcagaagacgaaaacgtactcgccatcaagcagacgctctaccgcgtcagcggcaactcgcccatcatcgcgtcgctcatcaaagccgccgaaaacggcaaacaggtcacggtgcttgtcgagctgaaagcccgctttgacgaagaaaacaacatcaactgggcaaagaagcttgaaaaagccggctgccacgtcatttacggtctgaccggcctcaagacccactgcaaaattgcgctcgttgtccgccgcgaggaagacggcatccgccgctacctgcacctcggcaccggcaactacaacgactccaccgcgaaaatttataccgacctcggcctgttcacctgcaacgagcagttcggcgcagacgcgtcctcccttttcaatgtcatcaccggctattcccgtccgccggagtacaagcacttcatcgttgcgccgcacggcatgcgcagcttctttgagtacatgatccgtcaggagaccgaaaacgccaaaaagggtttgcccagcggcatcacggtcaaagtcaactccctcgttgacccgaagatcatcgagcttctctatgaagcctccaaggccggtgtgcgcgtgcagcttatcgtgcgcggcatctgctgcctcattccgggcatcgaaggcgtcagcgagaacatcaccgtcatgagcattgtcggtcagcttctggagcacagccgtatcttccgctttgaaaatgccggcaacccgcgcatttacatgggcagcgcggactggatgccccgcaatctcgaccgccgcgtggagcttgttttccccatcgaggacgaaacacagaaggcccgcgccttcggcattctcgataccatgctgagcgacaccacaaacgcccgtttcatgcagagtgatacaagctacgagcacgttgacctgcgcggcaagaagaaaatcagctcgcagcttacattctaccatgaagcacaggcgcgtctgaaagagctgcagtccatcgaaaaggacagcgttttgatcccgattcactccgcggaagaataaagcttgcatagttgtaaataaaagattataatagaataaattgagcggacttcggcgcgttttgctgtccgcacaccacaacgaaaggttgaggaacgatgaaaagaatcggtattttaacaagcggcggcgactgtcagggcctcaacgcctccattcgcggcgttgcaaagtcgctttacgaagaattcggcaacgacgtagagatttacggcatcaaagacggctataaaggtcttattttcggtgaatacaagctgatgaaaccggaagatttctccggcatcttaacgctcggcggcaccattttgggcacctcccgccaaccgttcaagctcatgcgcgtcatcgatgaaaacagcgtcgataaagtcaagaacatgaaggataactacaagaagatgaagcttgactgcctcgtcatcctcggtggcaacggcacacagaaaaccgcaaaccttctgcgcgaggaaggcctcaatgtcgtctccctgccgaagaccatcgacaacgacgtctggggcaccgatatgacattcggcttccacagctccgtggagatcgcgacgaatgtcctcgactgcattcacaccaccgccacctcccacggccgcattttctgcgtggagatcatgggccacaaggtcggctggctgccgctttatgccggcatcgcgggcggcgcagatgtgattttgctgccggagatcccgtatgatattgacaaaatcgcaaaaacattggataatagaatcgcaaacggcaagaagttctccattctcgctgtagccgagggtgcgctatccaaggaagaagccgccatgaagaagaaggacttcaaaaaggcgcgtgccgaaatgaagtacccgtccatcgtgtaccgccttgcagacgagcttgcctcccgtgtggataacgagatccgtgtctgcgtaccgggtcacttccagcgcggcggcagcccgtgcgcctacgaccgcgtgctctccacacgcttcggcgcggcagccgcaagtctcatccgcgagaagaactacggcaacatggtcggccttgtcaacggcaagatcgtcccggtgccgctcagcgaggtcgcaggcaagctgaaaaccgtcccggtcgattgcgaagaaatcctcgcagcccgtgagatcggcatttccttcggcgactaaattcgcacaaaacgtcaaaagagacgttttaataaaaaggattgtattgaaaggattgacccacatgaaattttccgtcagtatgtacagctacatgcagaagatccgctccggcgaggctactccgtttgagctgatcgcgaagaccaaggaactcggctttgatgccattgagtttgtcgattttaccgatttcggcaccggcaccaaggaagagcgtcttgcccacgccgaagagctccgcaaggaatgcgagcgcgtcggccttgagatttccgcactcgtcatgagctgcgacttcatcaccggcagcgacggcgacctcgataaagagattgctcgcgtaaaggattacgtcgacatcgcacgcgtcctcggtgtcacccgtatgcgccacgacgcagccattggctatgcacgcaactccggtgacttctgcccgtttgatacgatgctcccgcgcctcacaaaggcctgcaaggaaatcacggagtacgctgcacagttcggcatccgcaccatggtcgaaaaccacggcttctatgtgcaggattccgagcgtgtcgagaagctctacgcagcggtcgacaacaaaaacttcggcctcctcaccgatatgggcaacttcctctgcgcagatgaggacccggcttccgcatttgcaagagttgcgccgtatgcgtactatgtccatgcaaaggacttcatcgtaaagccgttcacagatgccgatccgggcgaaggcagcttccgttcccgcggcggcaagtacctgcgcggcaccattgtcggccacggcaatgtaccgatcaagcagtgcatgtatcagctgaagcgtgcaggctatgacgactgcatctccatcgagtttgagggcatggagcccgtctttgatgcactgcgcatcggccttgcaaacctcaagaagtattgggctgaggtctgatcccccctatatccaaaaacctgatttaaagtttgggcttcgtgtcttttcggcacggagccttttcttatgcccctaacgagagatgtcgtatcacatgttataccactttgaaattaacttctcttctttttcgaatcctatcattttagcacggacaagagaaaacagagcttttttgttcccccgcttgcaatacaactcagaaaggtgtacaataaaaatgaattttgcgcatctgtgtcctgcatagctgcacaagaacttaaggagtgattgaaaatgtccgttaaagaaaaatttctggattacgtaagctacgacacccagtccgattcttccagcaccaccatgccctccactatgaagcaaaagctgctcgcacagcaccttgccgatgaaatggtcgccatgggcattgaagatgcacacatggacgagtggggttatgtttatggcaccattcccgcaaactgcgaaaagaagaacgtcgtcggcttcatcgcgcacatggataccgcagaagaagtctccggcgcaaacgtcaaagcccgcgtcattgaaaattacgacggcgaagacattgtcctcaacaaagagctcggcatcgtcaccgacgttgaaaatttcccgattctcaaaaaattcaagggtaaaacgcttatcgttaccgacggtaccaccttgctcggcgcagacgacaaggcaggcgtagccgagatcatgcaggctgcggaagacatcatcaaaaacaacctcccccacggcgaaatccatatcgcatttaccccggacgaggaaatcggcgcaggcccgaataagttcgacgtcaagggcttcggctgcgatttcgcctacacgctcgacggcggcgagcttggcggcctcgattatgaaaacttcaacggcacctccgccgatgtggagattaccggcagaagcgtgcatccgggcagcgcaaagaacaagatgatcaacgcaagccgcgtcgccatggagttcgcttctctgctgccgagccgcgaagtgccggaaaacaccgagggctacgaaggctttgcgcatctcaacaacatggagggcgacgtagaacacgctcacctgcactacatcatccgcgaccacgaccgcgaccttctggaagcgagaaaggataaattcaacctcgcggccgagttcatcaaccgcaagtacggcttagagctcgtcaaggtcacactgaaggacgcatactccaacatgaaagaaatgatcctgccgcatcaggaaatcctcgacgttgcccgcgccgccatgcgcaaaaacggcgtagagccggtcaccacccccattcgcggcggcacagacggcgcacgcctgtcctttatgggtctgccctgcccgaacctctgcaccggcggagagcttgcacacggcagaaacgaatttgccgttctggaagagatggagaccatcgtcgagatcgtcaagtccatcgcagagctcgttgaataatgggaaaggaacctgaaactatgctgcgatttggaacgatcggcaccggctggatcgcgaacagctacatagacggcgctttggacagcggcctgtggcagctcacagccgtttactcccgcacaaaagagaaaggtctggcttttgctgcgccttacggcgttaaaaccgtctttaccgacctcgaagaaatggccgcaacggacaaaatcgacgcggtgtatatcgcaagcccgaacaaactgcatatcgagcaggcacgtgtttttctggagcacggcaagcacgtcatttgcgaaaagccgctttccgcccacgcaaaagatgtagcagagttgcaggcgcttgcaaaagagcgcgggctcatctaccttgaagccatcatgttcatgcacctgccgcagagaaagcttttagaagaagccttaaaaaagatcggcgatatctccgtagccaagattgatttctgccagcgctcttcaaagtacgatgcgtacctcgcgggcagcctgccgaatatctttaaccccgcgctcgagaccggcgctttgatggatcttggcgtttattgcgtctatcccgcgctgtatctgttcggtaagccgcagaacacgctcgccgtgtcgcatttattggcgtccggcgcagacggcagcgacattgtcgccatgcagtacccggataaactcgtgaacctcgtgttctccaaggtcggtcaggccggcgcgaacacagattttcagggcacaaacggcactgtatccgtggagtccatctcaaaactcgccaacatctccatccgttataacaacggcaccgtagaggagatttgcggcgaagaagaaaaattcaagctgatgggctacgaagcgaaggatttttaccgttatattacagaacccgaagcttcctgcgcggaatacgagcagtgctccgccctcgcttacaacgtttccgtctatatggaagaaatccgcaagctcgcgaacatccgcttcccctccgataattaaatttataaaacaaaacggcaccgcatgaggtcttttcccgtgcggtgtcgttttcgtatggagtgaattcagttcttagcgtctcttttgttctttttacgcgggctttccgggtcttcatctgtgtgccgaatatcctgcattacgtcccatggcgtcagcataccgagcagcggctcatctcggctccccgtcttcgtgatgaaaatgaccgaaaggcgtttgttgcgaccgcgtatcttctcaaacatacgccgcgcctcaatgcaggtcgttttctcgtcgacgaacgcaaagttttccacatgcttttctacggccagcattttcccaagctgcgaaagcgtcgtttccttcgtgatgcgcaaggttgggtcacgcaaaatgcacgaaaagattgtggacacgctgaaaacaccgagaaatttctctttttctataaccggaatgtgcgaaaagccgctcttgtccatgctttccatcaaatttaaaacgcgagaagaaagccttgcacagcgaatgctgctgccttttgtcgcaaagtcgagtgcaagcggcggacggcaaacgtagtcgagcgcctcccgcagtgcttccaccaccggctcgctcggctccacgatcggctcgccgccgaggttcgcattgtgcgtcatcaaattgcggatttcccggcagagattcaacgtctcgcgcacaggcgcgctttcataatggttgatgtactcaaaaaccacgctggaataccgccgctgctttgcggtgctgaactttacctcaagttcatcctccagctgtttatataaatcgataaattcatcgctgcgcatggattacactcctttgtttaaggataccacaaaaaatgcctccgcgcaaggctttgcagataacaaaaaacccgatacaaattgtaccgggtttctggagctgatggtcagaatcgaactgacaacctgttcattacgagtgaactgctctgccattgagccacatcagcatattgggttttgcaacgttaattattataccgaattttctccgtaaagtcaacccctatcgcgaattttcttttaaaaaatatttcgagcggacaaaatccgcctacgccggacggtttacggttgtaaccacgcacaatgtgtggtacaatgatacatacagaaattcaggatgggaaagggcggcttttcatgggttataagctggagctcggcgcatggagcgcggttttcgccgtgccgaacgcgcttgtagatcgatatatcaaggaggcggacggagatcagctcaaggtcatgctgtggcttctgcgccataacgggcggccgtatgcagcggaggatcttgcagctgcgctcggcatcaccccgcagcgtgtcgataccgcgctcggcttctggatgaaaagcggcctcatttgcagcgttgacaccccgcttgataccgcccttacgccgaatcacgtggagagccccgcgcccgtcgcaccgcagccaaaggccgctccaacacagccgcagcgccccaccgcgccgaagcgtatgctgcgcccggacgggctttatatctcggagcgcgtagagtcctccccggagattcgccgccttgtagaggaagcgcagaacctgctcggcaaaacgctttctcccgctctttccggcacgctcattcaggcgcacgaagattacggcctgccatgcgaagtcattttaatgcttatcgcctacgcgaataagattggccgcgcaaacacgagctacatcgaatccaccgtgcgcaactgggcagattccaacattttaagcattgccgccgcggaggaaaagctgcgcgagctcgacgagaccgccatcgcgtggaagcgctgtgaaaatgcgttcggcatcacctcccgccgcgcacccagcaaaaacgagagccagtttgctcacagatgggtgttcgagtggcgcatgcccgatgagcttctaaacgaagcctataaccgctgtgtggataacaccggcaaggtcaacatgaaatacatcaacgccattttggaatcgtggcacaacgcgggcatccataccttgaaagaagccgtggatgaaagaattgccgccgaagcccgccgcgagggcgcgcattccccctcatatagtctcgattcttacgaaaagtttgatacattcaatacggagaaataaaccatgggatatgcaagacaggtctaccttcaggctgaaaatgaattaaatcgacgccgtaccaccgcacaggacaccgcacagcgccgcttagaggacttttacgccgtctgccccgaagccgaagacgtgcgcagacgtatcgcttccacggcaagtcaggcggccatggctgttttgcgcagcggcaacgcgagagagactatggaagctctaaaaaacgaaaatctttcgctgcaaaagcagtttgccgatctccttgccgcgcacggtctcacccgcgccgatattgagccgcagtacacctgcaagcgctgcgaagataccggctatgtagacggccgcatctgctcctgctaccgcaatttgttaaagcagatcgcctatgaaaacttgaaccgcatctccccgctgacgctctcgtcctttgaggatttctccctgctctattattccgatatatccgtaaacggggagcgttccgaccgtgaacagatgcgaaatatcttcaattattgccgccgctatgcagacaatttcaaaaaagatagtggaaatttactttttacaggtgccaccggtctcggtaaaacgcacctttccctcgccatcgccgcagaagccatcaataaggggttcggcgtagtgtatggcacggcgcagacttttgccctctcgctcgagcgcgaacgcttcacgcgcaccgaagaatccggcgatgatacactcgatcttttaaacgactgcgacctgctcatcatcgatgacctcggcatggaaatttcgtcatcctatatcatgtcggccatctacaacgtgatcgatacgcgcattatgctgaaaaaaccgactatcatcagcacgaatctctccatgttagagctcgaaaagcggtatacagaacgctttgtttcccgtgtgatcggtttttatgatcgcctgccatttcgcggcaaagacattcgcatgcaaaaaaagctcaatccgcaaaataaacaaaattagcacgcaagcaaaaagccgaacggcatcggaactttccccgccgttcggcttttataatttattttaatacttcgcggattcaatctcttcaatcacgccgcgcacggctttctccaccgcgccatcttcaaacggcaccggaatgccgacataatgcagcagatcaaaatagcccagcgtgccacccgctttgcacagcttcaaataacgtgcccaagcgctctcgcggtctttcttcatctcgtcatagaagaagaatgtacagatctgcgccagcgcgtaatcgatataatagaacgggtagaggaaaatgtgctgcttctgcatccaaaaaccaccgttttccaagaatgcgttgccgtcataatcgcgccacggcatatattttttctcaatgctgcgccacacaccgcggcgttccttcgccgtcatcttcgggttcttgtatacctcgtgctggaactcatccacgcacgccatgtacgggataacggccagtgcgtcgcacaaatgtgcataacggtattcgtccgcgcggtcgccgaagaatttatccatccacgggtaggtgaaaaactccatcgacatcgagtggatctcgcacacctcgctcgtagagccctgcaaaacgccgatcggaatcaagcgctcgccaagatatgcctggaacgcgtggccggcctcatgcgtcaaaacatccacgtctgctgaagtaccgttaaagttcgaaaaaatgaacggtgctttgtattccggcaaagatgtgcagtagccgccaaggtgcttgcccgggcgcgtctcaaggtcaaacagctcgtacttcgtcatgaagtcgaagaattccttcgtttcgggcgagagcgcgccgtacatttcggtcgcctgccccaccatataatctttgccgccgataggatctgcgttgccgcctgcaaatgtcaaactctcatcgtagtatttgacggaatccaaaccgaggcgctttgcctgcgccttgcgcatgcggtccaccgccggcgtgataaccgtgcggatctgctcgcggaatttctccacgtgctcgggcgtgtagtccagtctgcccatattgcggtacgcaagctcggtgtaattgtcatagccgagcttcttcgccatctccacgcgcacttcgatgagcttatcgtacaactcatcgagcttgtcggaaacgccctcgtaaaggttcgcccacttttcaaacgcttctttgcgctcctcgcggtcggtgctctccatatgttttaaaagaccgtagaaattgcaggtctcgccgtgaaaatccaccttgcaggaagccgcagccttggaatactccacggaaagctccgattctttcacaagctccgggataatgcgctcgtcctgcgtcttgaggtcgttttccaaaaccgcgatgaaatgcgcgccgtattccttttcaaagtctgcacggaacgggccgttcacaatgtcttccttcatcgccttctccgccgggatcaggttcggcagattttcgttcagatacgccatttccgcttcgtagaattcatctgtcgtgttcatcgtgttgcggatgctgcaaagcgacgcgatcgtagacaagtgcgtgtcaagcttttcagcgtctaaaaacacctttttcgcttcctcaaaagtctttgctgccttaaatgcctcgctgtaccgcttatattcctccactgccgccgcaatgtccggtcgggtgtacggaagttcactgaatttctgcacaacaatacgcttcctttccaaaatctatttgcgcttatcataccactgcttcgcacattttgcaagctgtttttgtttatcctgcacagcaaaatgtaatctatgcaaaaagagaccgcgcacaaagcccgatctcttcttttctttgagataaattttaagttatttcatctcgccaacaacctcacgaatggacttcgccagaatattgaggcccttttccagcgtatccatcggcaccttcagctccggcatgatctttacaacggaatcgcggcggcctacacgctccacgatgaggccgttttcaaacgccttgtgaatgactgccttcgcaacatcgccctcaaacgcgccgaaatccacgccccacagcaaaccgatgccgcgtgtcgtgatgcggctgtcaatcgtctcaatgttctccttgaggaacttctccacgaacggcgcacgctcacgaaccgcgtcttccacgtgctcgttcagcatgaactccaggcccgctttcgctgcgaccaaagacagctgatagccgcggaatgtgccgttgtgctcgcccggcttccactggtcaagctccgggcgcaacagcgtcagcgcaaacggcatgccatagccgccgatggacttcgagagcgtcacaatgtccggcgtgatgcctgcgcgctcaaacgagaagaaccagccggtacgggaagcacccacctgcacgtcatcgacaatcatcaaaatgtcgtacttgtcgcacagtgcgcgcacgcggcgcagccactcatcgggcagtacataaatgccgccgtccgcctgcgtcgtttccaaaatgattgccgccggcttctccacgccggagtggtcgtctgtgatcaggcgttccatatatgccacggtgtcgagctccgggaacatatacggtgccggaatgtgcgtcacgttgtaaagcggcacgcctgcgcccttgcgggagtccgcattcgttgtcagcgctaaagaacccagcgtcatgccgtggaacgcacccatcagtgcaaagacattgttgcgcttctttaccttgcgagccagcttcaaggccgcttccaccgcgtttgtgccggtcgggcctacaaactgaattttatagtcaaagccgcgtgggcgaatgacttcattttcaaaatattcgatgaattcgcgcttcggtttcgtgtacatatcaagcgcgtgcatcacgccgtcgttttgcaaatattcaacgaccttctctttgatgtacgggttgttatgcccgtagttcagtgcgccggagccgcaaaagaagtcgatatactccttgccgttctcatccgtctggatagagcccttcgccttgacaaagaccgtcgggaagttacggcagtaagagcgaacttcggattcatacgtttcaaatgctttcgtgttgtttgtactcatgtagtaccatcctttctaccatgccatctgcatgattcagcgatcacacgcgttatgcgtggggctgcgtttttcccgctcatgagttttgaagcgagcgtcagcggtcgttcggccaatgtgtaatagaaattttggccggatccatacggcacgcacaaatcgttttatgcgataccgtgattaagtttaccacacttgtccgaaaaaagaaaggtcttctttcgcaaaaaacatatatctctgcaaaaattctgcaaaaaagagcagcgcccgcaaaagacgctgcccaaatttacaaaatctaaatttattcgatgttttcgccgagcgtaccctggctgagcgccttcagatacgcagtgatgaaatcatcaaggtcgccgtccatcaccgcgctgatgttgcccttttcgcagcccgtgcggtgatcctttacgagcgtgtacggcatgaagacataggagcgaatctggctgccccacgtgatctccttctgctcgcccttaatgtcggagattttttcaaggtgttcacgttccttgatctcaacgagcttagagataagcattttcatagccacgtcgcggttctggtactggctgcgttccacctggcaggaaacaacaatacccgtcggaatgtggatcaaacgcacggccgaagaggtcttgttgaccttctgtccgcccgcaccgctcgcacggtacacttccatcttaatatcgtccgggttgatttccacgctgaggtcctcgtcaatctccggcataacctccagagaggagaatgaagtgtggcggcggcctgcggaatcgaacggcgagacgcgcaccaaacggtgaacgcccgcttcactcttcaaaaagccataagcattttcgccctcgacaaggatggaagcgctcttcaggcccgcttcgtcgccctcaaggtaatcgagcgtagaaactttaaagccgtgacgctcaccccaacggttgtacatacggaacagcatctcggcccagtcctgtgcctccgtgccgccggaacccgcatggaacgtcaaaatcgcgttcttactgtcatattcgccggtgagaagcgttgtcagacgcatcgtctcaatctctttgccgatggcctccacttcctcctgtgcctccggcaaaagagaaaggtcttcttcctcattgcccatttcaatgagcgtcagcgtatcttcgcagcgggaaacaaggttcagatacgtctcgtccttctgctttaacgcagcagtcttctgcaaaatcttctgtgcagattccatgttgtcgtaaaagcccggctccgccgccttgttttccagcatctccacttcttcacgcagtctttcaaggcccagcgcgtccttcaattcatccagcgccgcctgcttttcattcagttcatgttttaatacttcatattgcagcatacgttttcgttacctttcaaaaatatccgtccaaacccgccttcaaacatttcacggcggcgttcagcttaaatgtgcgcaaatctttgtttattataatagataacccgccgtttgtaaatagaaaaaatgcgggaaaacgcacggtttcgctgaaatctttatatttgcctttcttgaagttttattccgttttctcactgaattattaacagtctgaaaatttgcacgctttgcattgcgattgcgggcattttgtagtattatatgaataagaaaataattctggcagtattctgaccgtctttcgaatattgccaaccgaattttggaggttctgttttggactataaaggcatcaagtgtcccgtgtgcgacaagccgtttacggaaaatgacgatatcgtcgtttgcccggtctgcggtgcaccgtaccacagaggctgctataaagaaaaaggtgcgtgcattttcacagatctgcacgaaagcggcaagacttgggcgccgcctgttccgccggacgcgccgaacacggccagtgagcttaaagacaaggaatgcccgaactgcggcaccttaaacgcccacagcgcgctgttctgcaacatctgcggcacttccctcaccggcgcgccggatgaacaccgcaacacgggctacaacacgcagcaaaatccgaataacgcgaacaatccgaacggctataacaattacaataacccgtacggcagttatcccccgccgcaaaacaacgcaaactatcagagccgcggctttggcggcgtgccgttcgcgttcgaccccatgggcggcgcaaatcccgcggaatttgttgcggataatgtcacctacggcgacgtgagcaaggtcgtgcagcagaatacggcgtattacctttccgtgttccgcaatattaagtctttcgggcgcagcaagttcaatttcagcgcattcctgttctccggcggctggctcctgtatcgcaagcagtacaaggcgggcatcatcacaacgataatcatgttccttttatatatcgcgaacctgatgctctcgtgtttcgtcgtcaaccccatcacgacgcacgtcatcgataacgccggcgtgtcttcgtcggatctcagctacgtgcagcttgcaaacctgctttcgcagtacttgatggataacccctcacagtatcttttgttctgcctgccgcttttgtgcagcgccctgatgctcggcattatgatcttcgtcggcgtgcgcgcaaaccgcatgtatttaaatcactgcgtccgcaccgtgcaggagattaaaagcgtcagcaatacggaaaccgacctttccgcagaatacaccgcacgcggcggcgtgaacgttgtcgtaacgttctgcctgctcgcctgctatatgatcctgcgttggatcccgctctttttgacttgattccagcttaaaagcgacattaccgcttacggcttcacgcggtaatgtcgtttaagaatagaacccctttggaaaataggaagtatatttggaggtattgatttatgaaaaccgtcagaaaagccgtcatccccgcagcaggccttggcacacgcgtgctcccggcatcgaaagcgatgcccaaggaaatgctgcccattgtggataagcccgctatccagtttattgtggaggaagcggtccgcgccggcattacggatattctcatcatcacaaaccgcggcaaatccatcatggaagatcatttcgaccgcgccccggagcttgaggagcgtctgctcgcaagcggcaaaaaagaagtgtacgatgaagttgtgaaccttgcgcaccttgcaaacatcacctacatccgccagaaagagacgcgaggtctcggccacgccatctcctgtgccaaagcatttgtcggcgatgagccatttgccgttctctacggcgatgacgtcatcctcggcgaagatcccgcctgtggccagctcatccgcgcttataacgagaccggcaagggtgtcgtcggcgtgaaagaggtcagcgaagaagccattcagcgctactcctccctcaaggtagagcctctgcacgataactggttcacctgcaccgatatgattgaaaagccgagtaaggataagattatgtcgctttactccatcctcggccgctgcgtattgccgccgcagatttttgacattctcgcccacaccgcacccggcgccggcggcgaaattcagctcaccgatgccatgtgtgagcttgctcgcaccgaaagcatgatcgccgtcgatttcacaggcaagcgctacgatatgggcaacaagctcggcgtcatgcaggcacaggtagaagtcgccttaaagcaccccgagattggtgaaagcttccgcgcctaccttaaagagcttgccaaaacgctttgagtataaagttaattcacattacacatatgtaaagttcattcgctttgtaaagttagtcgacttcacaaagcgtctatatcaaatttgattttccaaaaatccgccgagttccaagatttttcttgactttgcggatttttatgttataatacttttgttagtttgtgcttatgcgttttgtgtaacacaaatgacaatccttgctccgtttaaaagtacggggccaaagtccaaaaggaggtgcaaaccatgacagaggtagtaaagaacaagtacgagaccgttatcgttctctccgcaaagctcggtgaggaaggtaatgcagagctggtcgaaaagttcaaggcattgattgcaaagcacggcactgtcgagagcgttgacgagtggggtaagagaagactcgcgtatccgatcaacaaggaaaccgaaggctactacaccctcgtaaacttcgagagcacgccggacttcaccgctgagctggacagacgctataagatcactgacggcgttctccgttccatcatcgtgaagaaggatccccgttttgcaaccgctgctgcaaagccgcgtaaagccgctgagccgaagccgatcgacgttgaggctgtcgcagccgaggctgtcgaagcaaacgagtccgctgctgagtaagttttttgaaacgaaagagagttgttacctatgttgaatgttgcagttgttatgggcagactggttgccgatcctgagcttcgccacaccccgagcgatgttgccgttaccagcttcatgctggcggtagaccgctcctatgttaagtccggtacagaacgtcaggctgatttcattgatgttgtcgcttggcgcagcaccgcggattttgtatgcaaatacttccgcaagggccagatgatggcggttcacggttccattcagacacgcacatatacagataaggacggcaataagcgcaaggcgaccgagattgttgcgaacgatgtcaattttgcggattccaaacgcagtgacagcggcgcaaattacggttccccctccgccccgtcttacggcaataattacggaagtaacagcgcagccggaaatgaaatgcagcgcccggcttacagcgaacccgctcccacctattcaagtggtaacagcggagatttcgaggagatcatcggggacgacgacctgccgttctgatgatccaacaacgactaagataaggaggctttcgcaatggcagacagaccggagagagataatcgccgcggtggtcgcaagggccgcagaaaagtatgcagcttctgcgttgacaaagcggattacatcgattacaaggatgttgccaagcttcgccgttttatttctgaaagaggcaagatcctccccagaagagttacgggaacttgtgcacatcatcagcgtggcctgacagtcgctatcaagcgtgctcgtcacctcgctctcctgcccttcagcagcgactgatcgtgcagatctaatatcagcgtacaagggagattttcgtcggaaggtctcccttttgctatcccccattgatttgcaaaacccgcactctgtgcctttaacggtacagaatgcgggtttcttttaatttacttgaatcgtcatcagaacaggcgaatgatcttgccgccgcagccgcaatggtaccgctccgggtgctgcaccactgccgtgagtttcatgcgcggaaactgccttttgcattttgtacattgcagcatatatttcaccggtttctcctcgtactccacaagtgcttccttcgtcgttgccgtaatgcagtagctatacgcgttgttcatcttacctgcgtatgtcttccaaaggagcttgtgattcatgcagcgcgggcacgtgtgcaaaagctcatgcgccaaaacgctgcgcacacaattctcgtccttgtcctccagatacgctgaaacctcgattcgatattcatatttttcgccatgtaatcgcatacagcgaccgtagcgcttttttgcgcgcgtgttgatctgtacctccggctcgatattgcccgagaccgggatacccagcgcacgcacttcttcgtagatttctttcatcaatgcgttataatcatacttcataaagtttcctcgcttttctttattttactactatctactacgaaataaaagtggtataattaaaaaggaaaatcgttttcctatcaatttttcggaggaattttcatgaagtattattcgatcggctacgccgtcaacgacggtttgccggaagttacacgcgaagacgtgcagaagctcacccacatgaaccttgcgttcggtctcatcagcgaaaacggccttttggatctgcaccagatgacacatctcgatctcatcccgcagttccgcgattggaaccccgctctgcgcgtggtgctttccgtcggtggctggggcgcgggcggcttctccctcatgtcccgtaccgaagaaggccgccgcgcatttgcggagtcttgccgcaaagccgtggaggagtatcacctcgatggcatcgatatcgactgggaatacccgtgcagcgaccaagccgagattgactgtgactcgagcgataaacagaactacacaaagctcctgcaagctctgcgcgacgcccttggcatgaaccgcatcgtctccaccgctgtcggcgcaggtgattatttcccggaaaacaccgaaatggacaaggtcgccgagatcgtcgattacgtgcagctcatgacctacgacatgcgcaacggcttcacgcatcaagccggccaccacgcctccctcagtgccagccgcggcgatacgagcaatacgaacacgcgctacatcgtcgagctgttccacaacgccggtgtgccgtacaataagctcgtcgtcggcgcagcattctactgccgccattacacgggcgccgcaaacgtcaacaacggcctcctgcaggaagccagcgccggtatgtacggcccgaactacgacggtctcaccgaggagtttcgccgcgagcataactacacggaatattgggacgaggacgctgaagccgcatatctctggaacggcgaaacgttcatcagcttcgagtcccccgaggctatccgccgcaagtgcgagtacgtcaaggaaaagggcatgctcggcgtcatgtactgggagcacagcgccgaccacacccgtgagctgctcactgtcatcgcaaaaacactgaatatctaaattctaacggaaaaggagcctgcgcgcatgaaaaccgcgttcaggctccctttttaccgataaaaacaagaatcatccctgttttttgtaaaataaaagacccatcggaaattccgatgggtcttttagcgtggtgcgcgagacgggacttgaacccgtacgtcataaacacacgcccctcaaacgtgcctgtctgccaattccagcactcgcgctcaacaatatgtattatagcataagccgcgctgtttgtcaactgttatttctcaaaacgcaaaaacatgtccgttttttgcattttaccgcaaaatgctggtgaaaagggtcaaaacatgctatactgcatgtaacagaaacacgggaggaaaacacgatgacatacacaaaacgctatatgtcgccgattggcgtgatcttgcttgcagcagacgacgcggggcttacggggctgtggtttgagggcagcaagtattttgcggcggagttgccgaaggcgcacatagaacaggacatacccgttttactcgaaaccacacagtggctcgacgtatattttgccggaaaagaaccggatttcacgccgccgctacacctcatcggctcggattttcggcaggcggtttggaacatcctgctctctatcccctacggccggacgatgacctacggccagattgcaaagcagcttgcagaaaacaccgggatagacaaaatgtccgcacaggcggttggcggtgcggtcgggcacaatccgatctcgatcatcgtcccctgccaccgcgttgtgggcacgaacggcagcctgaccggctacgccggcggccttgataagaaaatcgcgctgttgaagcttgaaaaagccgacaccgcaagacttttccgcccgaaaaagggtacggcgctgtaacacgcccttacactagaataaacgaaaaggtcttccgttaggattgcgggagacctttttgctataaaaaccaagctaaacgtaaaatataagacccatcggaaactccgatgggtcttttggcgtggtgcgcgagacgggacttgaacccgtacgtcataaacacacgcccctcaaacgtgcctgtctgccaattccagcactcgcgctcaacaagtgatattatagcaacaaacaggcaaattgtcaagactattttaaaagaaacttgaattttttaaaaagccggatttgcgtcggtttagtcctcaacggcaatggcgttttcttctttgatttcttccgcgagcagcatgcgcacggggtgctcggcggtatacggttgccatgtgggcaaaccctccccattcgggtcgccggtctttgcgaagtttgcccagtaggaggacattgcagcttcaagcgtatagtcgcacggtttccacgggcgccagcatctgttcatcgtgtggaaaacataccacagctcggacgaatggaacgcacctgcgttgtcgcctggcaactgacggttgaagaaatagatgtagctcgggcatctgccgagtttattctggttcttcgcccagcgcacggcgctcttttcgagaattctatcgcccgctgcgatgtcgccgccggtgcagccgatcatgtaatcgatgtcgtgcacattgccggaaagcgccacttcgtctacggaagccttcagcagcacgttatcaacaacgggctgccacgcaagaccgcttggggactggatggtatactgcacctcggcgattttttccgccgggacagcacgcatctcttcgatgtttttcgcgccgagcttttccatcagctctttggaggacttcacgcgcatttcaatggaaacgtcgtgcgaaaggccaccaaggccgcctgcgctctgcaaaacggcacgcttaatcttgccgcgcgtcaaatcggacgaaataagcgtctgcacgctcatgcagcctgcagactggcctgctgccgtgatgcagtccgggtctccaccgaacgccgcaatgttctcgtatacccagtcgattgctgcaacctggtcgtaaattccgtagttgccgctgatgccctcggggttttcggcatcgagctccgggtgcgcaaagaagccgagtgcgccgacacggtagttgatggagacaaacaccacgccgtttttcgcaaactgctcgccgtcgaactccttttccgcgccgctgccatgcgtgaacgcaccgccgtgaatccagaagaacacgggcaacttatcgcccggctgcgcagatgcaggcgtccagatgttcagatacaggcagtcttcgctctgctttaggttttcatcactgtaaaactccttgccgtagaggtccattttagacaggtcagcctgcggtgctttggcggagaactccagtgcggggcgcacaccctcccactttgcgtgcggctgcggacgcttccagcgcagctcgccgaccggcggtgcagcatacggcacgcccttgaagatcacgctttgcttatcatcggaaaacgcaccttcgagtgcgccttctttgacggttacgatcgtattcattgaaacttcctcccagggataaaattcacggcaacgccgcggataaatttctgcggtgctgtcggtggtttataaatttagtttatgcgttaagctgcttcaggagcatctcacctgcgccggcgggcacgctgtcgccgccaaacgataacagcgcacgcagcggcatttccgccatcatacgcgccatggcctcgcccatgccgatgtcgtccgcatctgcctgtgcaagcgggttctgtgccatcatcttgccgagaatctcgcggccgacgggactttccataatctcttcaatcgtggaattcattgtgtagacgcacttaatctgcgtagtagaggtgacgttcaccgtcgcggtgcaggcgatgtcgcggctggattttgccgccataatcgtgtagtcgccggactcaacgtaccaatcggaaatatcggtgcggtagtacgcgaacgcacgctttgcgagcgtaaaggtgacggtcttctcctcacccggcttgagttcgaccttttcaaaaccgcgcagctcttttacggggcggatggtgcggctttcaggctttgcaacatacagctgcacgacctctttgcccttcaccttgccggtgttgcggacgttgacggagacggtcagtgtatcggtatccttcatctcggacttatcaagcgttaaattgctatattcaaatgtcgtatagctgaggccgtagccgaacgggaacaacacgtccatgttctttttgtcatagtagcggtaaccgacaaatacaccctcgcggtactcggtcttattctgctcatcgccgaagaaatagaggtacgaggggttatcctccagacggcgcgggaacgtttccgcgagtttgccggaagggttcacatcgccgaacagcaggtcgagcgtcgcggtgccgacggcttcaccgccgaggtatgcgtacagcacgccgcgcacgtcatcaatccacggcatggtgatgcagccgccgcacatgacgacgacaacggtgttcttctgcacctcggaaacggctttgacgagtgcttcgtggtttttcggcatcgaaagcgtgcggcgatccatgccctcggactccatggcgtccgtgatgccgacgaacacaacggcgacatcggcgttctttgcggcctcctgtgcttcctcgaggagcgcttcgtcggactctgtggtgttcgtatcgtagccgggcgcgtaggtgacatcgagcccctttgcagcctcgagcgcacttgtgaccttataggagttcacgtgtgagctgccgccgccctgaaaacgcggagtctccgcaaacttgccgatgaacgcgagtttctggctgcgctttaatggcagaatgccatcatttttgagcagaaccatggactcatctgcaatcttgcgcgcttcttcgtggtcggcttcaaaatcaatcttcgtttcgtgctgcttattttcggtgtatttgagaacgatgttcaaaatgcgctccacggcggtatcgagcaccttgatatcgagcgtgccgttgttgactgcgtcaacgatctgcttgtcgtttgcggcgtttttgccgggcatttcaagctccatgccggcttcaaggcactttacgcggtctgcggtggtcgcgccccagtcgctcatcacgtagccgtcaaagccccactcgtcgcggagaatatcggtcagcaagcgcttgttttcggcagcgaacgtaccgttgatgcggttatacgagcacataatcgtccacggcttcgagtcctttacggcagtctcaaacgcagaaaggtaaatttcgcgcagggtgcgttcatcaacgacgctgtcgctggacatacggttgtattcctgactgttggcagcgaaatgcttcacgctgacgccgacattctggctctgcacgccgtttatgtagtttttggcaagttcgccggtgaggtacgggtcttcggaaagatactcaaaattgcggccaccgagcggagaacgcttgatgttgatggccgggccgagcagaacggaaaggttctccgcctggcaggcgtggccaagcacttcaccggagcggcgaaacagctcgcggtcgaatgagcacgccatgcaggagcctgtggggtagctggtggcgggcacgctggcgttgaggccgaggtggtcggcggcgtcagactgcttacggatgccgcacgggccgtccgagaccatgacggattcaatgccgaggcgctgcggagtatcgagatgccagaagtctttaccggagcaaagcgcggctttctcttccagcgtcatttgagaaatgatcgatttcacatccatacaaacaactcctatgactgatttgagttcagtatagcacactttcgcgaaaatttccatagacaattcagaaattttgttgactttattggtagaaagatattataaaagccgatgcgattacatcggcttttcatcacaatttgaatagtttctcaaagttatcataaagcatttttcggttctcttcctccccgtaggcgagtgcgaaaaagcgttcgagctccttttcgtgcgtccacatggggaaatccgtgccgaacatgactttatccataccgaaatgttcaatgctccttcttgcttcgtccgggttcaacacaaacagcgagctgctggtatcgacccacacgttcgcaccttttaggcacgctttggcttcatcccagcgctggtaaccaccgagatgcgcggcgatgcactttaattccggcagcttttcgagcacattcgcaagcttcttcggcgcagagagctcgcttctggcgtcacccatgtgaaataaaatcggcagatcgcgcgccatgcaggctttgtagaccggcagcattttttcgtcatcgatggcaaagccttgaaaatccgagtgcagtttaatgccgtgcaggccgagcgcctgaatttcattgagctctttttcgacgtcctcaatgtcccggtgccatgcgccaaggccgacgaacttcgggtatttttcgcatttggccgcgatgaaacgattgatggagccaacctgctccacttttgtcgcaacggagcagacgagaaatttatcgaatcctacggcagtgccctcttcgtttaaaacgtgcggcaggccgacctccgccatgggaagatcataaaaacggccaacgttttcggtcgccttttccgcaatcttgccggggtaaatgtgggcgtgcgcgtcggcggcacggtacaaaacgccgttatgcttcaccatgcgtcttcgcctccctttcttttttcgagaacacacagccacagaaatcctgtcgatataggttatagtctgccgaaagctgaatggagcgcttatagccctcctgttttttgaaatcggacggcaagtgcggcacgccgtattcttctgcaagcgcttcgccgatctcgtttagcttctgcgcgtttttcagcgggctgatagacagcgttgtcgtgaaaaaatcaaaatgatgccctgcggcatactttgccgctgcttccatgcgcagcttgtagcacgcaaaacagcgctcgccgccctccgggatgtgctcaagcccgcgcacggcggtgaagaattcttccggcacgtaaggcagatcgacaagcgctacttccttggtgcatggcatttcggagataagccgctttaactctgcttcccttttttgatactccgcctccggatagatattgggattataaaacagcacggtaattttaaaatgcgctgtaagcttctccaaaacggcgctggagcacggcgcacagcacgcgtgcaagagcaaagtcggccgcttttcctcgtgcgtaaaggtttcgatgagtgtattcagttcttttgcgtagtttcttttattagccatgactttattttatcaccgaagccccgttttcgcaagatatgtatactctttatcacaaatttcttacaaatccgccgtgtgaattgacaatattgccgtttcgcggtaaactatatgtatcaaattgtgctcatacggcgcatttcggtgtttgtgtgccgttttacagaaaggtttcgtgacatgtttgatttttctatattgatttctaacccgctcatcaacgtcgctgttgtttcgtggtgtgcggcacaaatcttaaagaccagcatccatctttttaaacacggcgaatttaagaaagagcgtctctccggcgcaggcggcatgccaagctcccactcggcggtaacgtgctcggtgctgctgacctcttacctgatctacggcttttcctccccgatcttcgccatggcgttcgtgctggcactcatcgtcatgtacgacgcgaccggcgtgcgctgggcggcgggtctgcacgcaaaagccatcaactacattgtggaatatttaggcgatgagaacaccaaggacaaagaccagctgaaagaaatgatcccgaagctgaacgaatcgcttggccatcgcatgattgaggtggtgtgcggcgcgctgctcggatttgcgatctcgcttatcgggtacttctgcttctaaaattcaatttgcatgaaaaaaacgttgcacggagctttcctgcagcgtttttattatggctctttcctgcggttttgaatgcggcgtatgagcagcgccgagccgccgacggcgagcacgccccagccaaagaggagcgatgcacggacaatccattccccggctgcgttctcttgcttcttgccatgaatgtgaagctttgcgcttccgccttccccgcactgcacggtaaatgtcatgctctcttcggcggtaagcgtaccgatataaatctcggcaaacccgagtgcagcactgtccccggagaaaagcatcacactttgcccgttttgcacacgcagaagctttacttcaccttggctttcttctgccgtgagatataactcaagcggcacggtacattcgtttttgaatacaaggctgaggggcacgccgctttcggctatgacagtcttttctaaacggtctccgctgaaaaacaccggcagcaaaaacgccgtgatgaacgccaggacccgaaccgaaaacatgcgcacccctcctcggccgccgggcgcgcatcaccatacgcgccgcctgtaagagggcaccgacgggcctttttcttcatgtatatgcgtgcgcgccggcgttatatacgcacggtaccgcatgacgatctccgcatgcctgccgaacaacttttccaaaagcgtcaggactgtctttttctcttcgcgatagtgctttccgtgtttcatcgttttcctatgccctttccgtaaattttgtaatctctacggataaaataccacgacacggcgaaatattttgtcattcccatcatgcggaaatcttgaactttccacgcatttgtggtaaaataaatcggttattttgaatttgtgaagaaacagaggttatcatcttggccgattttagaaatgagattgaaaaacggcgcacgttcgcgattatttcgcacccggacgccggtaaaacgacactgacggaaaagttccttctgtacggcggcgccattcagctggccggtgcggtcaagggcaaaaagaatgcgcgccacgccgtttccgactggatggaaattgaaaagcagcgtggtatttccgtcacctcttctgttatgcagttccagtatgagggctactgcatcaatattctggacaccccgggccaccaggacttctctgaagacacgtaccgcacgctgatggcggcagactccgccgtgatggtcattgacgcttcaaagggcgttgaggcacagacgagaaagctttttaaggtctgcgtcatgcgcgatattccgattttcacgttcatcaacaagatggaccgcgacgcgcagagcccgtatgatcttttggacgagatcgaaaaagagctcggcatcggcacgtacccgatgaactggccgatcggctccggtgtggacttcaagggcgtttacgaccgcgaaaagtccgaaattctcgcgtttgaaggagacaaagagctgcgcggtcaacacgaagtcaaagcgcacgagatcgatctgaacgacgcggcgcttgagaccattctcggcgaaagcctgtgccagacgctgcgcgatgacgtagagcttctggacggcgcgggctatgaatttgaccttgaaaaagtgcgtcatggcaagctctcccccgtgttcttcggctccgctttgacaaacttcggcgtggagccgttcctcgagagctttctgcgtatgacgacctccccgctgccgcgccaaacctcggagggtgtggttgacccgttcagcaaggatttttctgcgttcgtcttcaaaattcaggcgaacatgaacaaggcgcaccgcgaccgcattgcattcatgcgcatttgcagcggcaagtttgaaaaaggcatggaggtcacccatgtgcagggcggtcgcaagatcaagctttcgcagccgcagcagatgatggcgcagagccgcgaaatcattgacgaggcgtatgcgggcgacatcattggtgtgttcgacccgggcattttctccatcggcgacacgatctgcacgggtaaaaaagtgcaatttgaaggcattccaacgttcgcgccggagtttttctgccgcgtgcagcaaaaggacacgatgaagcgcaagcagttcgtcaagggcactacacagattgcacaggaaggcgccattcagatcttccaggagatcgcctccggcatggaggaagtcattgtaggcgttgtgggtacactgcagtttgacgtattcaagtaccgcatggaaaacgagtacaacgttgaaattcgcatggaaacgctgccgtactcactcatccgatggatcgacacgccagacgtggacctcaaaaagctgaacctcacgtccgacacaaaaaaggtgcaggacatccgcggacgttaccttttgcttttctcaaatgagtggagcatccgctgggcactggagcacaacgaaggcctggagctttccgagttcagccgctaaattttatgaaaagcaacgctctgtatggtttttgtgccgtacagagcgttgttgttatgtattgctgcttgatttttgcttgtggctgtccgcgacgaactctttcggcgtcatgccggtgcagcgcttaaagcgtccgcagaacgaggcggaatccgaaaagccgcaggaaagcgccgtttcactgacggtatatgtacccgccagcagcatttttttcgccgcattgatgcgcacctgcatcaaatattgcttcggcgacatgctttcggaagcggagaaaatgcggtagagatacgtgcggtctatgccgatatgccgcgcgaggtcgctgatctgaatgggatagccgtagttgcttttgatgtagccgatggccttattcacatactcatgctcgcgggtgtacgcgccgccgtgtgcggattcctccaaaacggacatcgcaccgtaaaagccgctcatcaccttaaataagctgcctttgttgaattcgtcgatcatctcgtgcatgtagcggatgaactcgtcgccgttttcaagctttgttgtgtattggctgacaaggcccgtgcggcgcaaaatctccagtacatcaaagccgtcgaatgcgacccacatgtactcccacgggtcttcgcgatcggcaatgtaatatgtgcgctcacccgggcggatgaggaagcactcgtttgcgtgcagcgtgtaggtttcttctccgacggtatacgtacccttgccggagatgacgtagtgcagcaaatactgattgcgcacggccgggccccagaaatgcccgccctcacatttttcgtaaccgcagtaatacacggtaacagagccgccgttattcaaattttccgctctatgctttatggtgttcatacctgtccctacctttgtaattccctattcagtatagcacacttaaacacaaaatacaacaaaatcacaacgaaaagaaacaaaaaatatagaatctgcacactatgcaccgtataatgaatacaagaatcgtttttatggaaggagttacaaattatgccaaaaattacattcatgggcgcgggcagcaccgttttcgcacgtaatgtgctcggcgactgcatgtgcacgccctctctgtgtgagagcgagatcgcgctctatgatatcgatgccgagcgtgtggaagagtcttacatcattctcagcgctatcaacaagaatacgaacggcggcaaggcgacactgaagacctattgcggcgttgagaaccgcaaagaagcgctgcgcggcgcggacttcgtcgtaaacgccattcaggtcggcttctacgacccgtgcacaatcatcgatttcgaggtgccgaagaagtacggtctgcgccagacgattgccgatacgatgggcattggcggcatcatgcgtgcactgcgcaccattcctgttttggaagattttgcccgcgacatggaagaagtttgcccgaacgcatggttcctcaattacacaaacccgatggcaatgctttccggctacatgcagcgctatacgaacgtaaagaccgtcggcctctgccacagcgtgcaggtctgctctaaggagctcctaaaggcccttggcatggaagataaggttgaaggccgccgcgagctcatcgccggcatcaaccacatgggctggcttttgaagattgaagacaaggacggcaacgacctctatcccgagatcaagcgccgcgccgcagaaaaaaatgcgaccgaaaagcacaaagatatggtgcgctatgagtacattcgccgcctcggctactactgtaccgaatccagcgagcataatgcggaatacaatccgctcttcatcaagtcccgttacccggagctcattgaacagttcaacattccgctggacgaatacccgcgccgctgcatcaaccaaatcaagggctggaaggaagaaaaagaaagcattttgaaggacggcaaagtggagcacacccgttccagcgaatatgcctcctacattatggaagctatggtcaccggcaacccgtataagatcggcggcaacgtactgaacaccggccttatcgataacctgcccgccgatgcgtgtgttgaggtaccgtgccttgtggacaagatgggcgtaaatccgtgccacgttggccgcctgccggtacagcttgccgcaatgaacatgacaaacatcaacgcacagctgatgacaatcgaagcggcacgcaccagaaagcgcgaggatatctaccgcgccgctatgctggatccgcacaccgcagctgagctttccatcgacgacatcgtgaagatgtgcgacgacctcatcgaggcacacggcgattacatggcgatgtacaaataactcaacgttttcctccattgatacttctatagaaatacacccgcaggaacgaaccgcctgcgggtgtattgcttttctaaccaattttactcgccgtcttccccgctgctttccgcgctgacgaggatgcccacaacggcgccgtgtgcaagcgcgtcgccggggctgtcggactgataaccgatgacgcagccaaccttcacatgatcgttgacttcggcgacctgcaccggttcgaaaccgagagcttttaaagccgttacggcttcgtcggcagtcatgccttcgatatccggcagcgtacgcagctgcgggcctttgcatacagcaatctttaccgtgctgccggcctcaataatctcacccgcgagcggatattgtccggtgatttgcccctccggcaatgtatcgctgaatgtttccttgtaaatttcaagctcgaatttatattttttgtccttttctgttaaggagagcagcttgtcgtaatccataccgacaaggttcggcacctcaagcgtttgcttttcttcgacaacgcccagatctttgatggacgcacggatgctttgcagcgagaacgggctgtctttgaaccacacgctcgtcacggcaaagatgacgacgagtgtaaacacgaatgacgcgacaagccacaggaaagcaggcacgcgacgcttgctcggcgtgcggccggaaccgctcggcagcgagcgcaccgtttcggtctcgacgaatttttccacaacggtcggctcagcggcaagctctgcggaaaagcgcgagaagtttgacgtgcggcgagagggatcaacctgcaggccgtttgcaatagccggaataacctgctccggcagctgctttaggatatttttggagatcatcaagcgcgggtcctgcttgcgcttcggcgcttccatgggcgcggcgcccgtgagcgcgaacaacaacgatgcgcacaggccgtaaacgtccgtgacctcatcacagattttcgttttggagtactgctccagcgcccagcagccgggaaaaatatcctcaatgaggtcggtgccggcacggcgcacagactgtatgtcaaagcccgtaacgatcattttatcgtcttttgtgatgcgcagtgtgttcggcgagataccgaggtgctcgacgttctgcgcatgaatggcgccgagtgtgtgaatgaccgggtaaaagaactgttcgcactgcgcccagcttagaacgccgtgctcctccacgtactgtcgcagggaaacggactctgtgaacgagaacacgatgtactgcgtgttgttctgcgaaaacgtatcgatggcgtgctgaatgtgtttggtatcggaaacacgcaggagcttctgcgcatagcgctcgaactcgcttaaatagtcgctgaacttgagttctgccccgctgaccggcagtacggacgcgccggtctcgccgcgcacagcgatggtatgcggataaaactcacgcacctctaccttctgcgccgttttagcttccaacgcggcgtatgtaatgcccgcgccgttgacgtgcacggcctgtcctacaaggtatttttcgccgagcaatgtgccgtacggcagcgcgtttttcacctgatcgccgttgtgccagccgcagtgcggacaggtattgctgctgtcctccattgcttcaaagcatctcatgcaatataatttgttctctcccatgcgctcagcttcctctcgatctccgcttcggaatgcggtgcatttttatacaacatccccgaaaaattcttttcactgaacacagtataccacattttgcctgtgctttcaaggtgtgtacgcacccgaaagcgcgaagaaactgtcggaaagctgcaagggccgcaattttaatgaagttgtaaggaaaattttgcttttcttttccggcattatattcgggcaaaaaaagaacgccccggttttcggagcgttctctgtaattcgatttaagctgaaattaagccttgtcgacggaaccgaagagctccatcttttccttaacggtagccttaatcgcctcaaagcccggagcgaggagctttctcgggtcgaagcccttgccctcgagatccttgcctgcttcgatgtactttctcgtagcatctgcgaaggagagctggcactcggtgttgacgttgattttggaaacgccaagggagattgcttccttgatcatgtcggccgggatgcccgtaccgccatggagaacgagcggcatagtgccggtgagcttctgaatctcagcgagaacgtcgaagttcaggcccttccagtttgccggatacttgccgtggatgttgccgatgcctgctgcgagcatgtcgacgccgaggtcagcaatcatcttgcattccttcgggtctgcaacttcgccgccgccgataacgccgtcttcctcgccgccgattgcgccgacctcagcctcaacggagatgccctttgcatgagcgatgccgatgagctcggtggtctttgcgatgttctcttcgatcggatagtgagaaccgtcgaacatgatggaagagaagcctgcttcgatgcaagccttagcgccttcgtaggagccgtggtcgaggtgcagagcaaccggaaccgtgatcttcagggtctccagcatgccgtttaccatgccaactacggtgttgtagccgcacatgtacttgcctgcgccctcggaaacaccgaggatgaccggggagttgttctcctgagccgtgagtaggatagcctttgtccattcgaggttattgatgttgaactgaccgacagcgtatttgcctgccttagccttgtccagcatttcctttgcagatactaacataaattcagcctccatgatccatgaaaggatttttatttctttgtatattatagaatatacagcgcaaaaaatcaaccctatttgaaaatatcgggctgtttcgcgttattttacaaaaaaagtaagaccttttcgcgatttcttacgacaaggtcttacaaaataccgtttatgttcagttatcggaagacttgcgctggagcaggacggcggcgatgatgatcgcgcccttgaaggcttcgcgcaggaacggcggaacgccgaggagattgaggaggttgttcataacggcgatgatgagcataccgaatacagtccccacaacggagcccttgccgccggacatgctggtgccgccgacgatgaccgccgcgatggaatcgagctcatagccgctgccggcgtttgccgggtccatagcgccgatgcgggagacctgcaatacggccgcgatagcgacaaccgcgcccatcagcgcatatacgccgagctttacacgattgacgttgatgccggaaaggcgggacgtcttctcgttggagccgaccgcgaacacgtggcggccgaacacggtcttcttagagacgatgtacagcacgagcgcgatgaggagccaatagaggatcggcatgaacatctggccgccgaccttcacacgggcgatctgctgaaaacccgtcggaaccttcggcgaactggactgcatgaactgctgcgtaacactgcgcaggatcttcatggcaccgagcgttgcgatgaacggcggaatcttgcccgcagtgaccatgaggccgttgaggccgccgaaaatgatgccggccgcgacggaaatcagaatggcaactatgtacgcaggtgcgccggtaaggccgatcgcgccgagccagccgccgtttgcggcgtcgataagcgtcatggtaatggcgccgaccgcgacaagcgtagagccgacggcaagatcaatgccgccggagataatgacgaacgtcatgccgagcgcgatgataccgacgctggagttgttacggagaatgttcatccagttgttaatccatgcgccgaaccattcgccgaagcttgcgtaattaaagccgagcgcgagcgtctgcagaatgaccatgacgatcagtgcaatgcctgtggaaaacagcgcattattcttccaattatcgcggaaccatgcgccaaagccccttttgtttgttttttcgttcattatacctgtccccctgttgcaaggcgcatgatggcctgctcattcatttcatcgccgacaagctcgccctgcacgctgccgtggaacatcacgacggtgcggtcgcacacgcggataatctcctgagcctcgctggaaagcacaatgacggcgacgcccgcctctgcgagcttcaggataatatcgtagatttcctccttagcgcctacgtccacaccctgtgtggggttatcgaacacaagcacctttgggtttgcatccagccactttgccagcaccaccttctgctggttgccgccggaaaggctgccgatgagatcttttgcggagccgagcttgatgtgcagctctttttcgaaatcatcaaaatccttttcaatcttcttcgagtgcaaaaagcccatcttgctgtctctgggccatgtgacgaccgtgccgttttcaagaatactcatatccttgatgatgccgttttccttgcggttgcgcggcacatagccgatgccggccttgagcgcctgccccgtagtgcggatatgcacgggcttgccctcgacttctaccgtgccggaagccccgtgtattgcgccgaaaaccgtctgaaacagctcacttctgccgtcgcccaaaaggcccgtgaaaccgagcacctcgccggcgtgcacttcaaagctgacgtttctgaaatgcggctccaacgtcatacccttgccgcttaaaataacattaccaatctttttctcacggcggagcgactgtgtgcgcacatcgtgaccgaccatgtcgcgcgccagcatatcgacagaggtctccgagacaaggccggaggaaaccatattgccgtctcgcagcactgtgtagcgcgtgcagatctccatgacctcgcgcagcttatgagaaatgaacacaatgcctacgccgctctttctcagcgtattcatcatatcgaacacacggcgaatttccggctccgtaagcgaagtggttggctcgtccatgatgatgatggaagcctccatcaaaagtgcgcgggcaatctcgacaatctgcttataggaagcatcgaggtcgcgcaccatgatacgcgggtcgaggtcaaggtccatttttttgaaaacttcgttcgttttcgcaatcatcgcggcagaatccagaaaacggttcttcttccgcagctcgtggccgataaacatattctcgtaaatggcaagatcatttacaaggtttaattcctgatggataaaagcaatgccatgcttcagggaatccgccggcgtttgaaacgcaacgcgcttgccgtccaataggatctggccctgatccgcatgatggacgccgccgagaatattcatcagggtagattttccggcgccgttttcaccgagcagcgcgcagatctcgccgccgtttaaggtaaacgaaacatcccgcagaacatcgtttgcaccgaaggatttgtagatccccttcatttcaagtgtcatacatacactttcctttctgtatggcgtacaaataggagatctgccgcccatagaagacggctatccccttttaacaaaaaaggctgctgcttgcgcaacagcccctttgcagaacttttaaattagtaaacggtgttctccgggtcgaggtactcgtcaacgttgtctctgtcaacaactgtcgtcgagataatcttgaccggctctacatccttgcctgcgagaacgtcaagcgccatatcaacagcgtccttgaccatcagcgggctgtaaagagaagactcaatccaaatgttctcgttttccttcatcatgttgaagtactcctggcagccgccgccaccggtgatgaccttaatgtcgtcacggtttgcttcggaaatagcctgcagaacaccgatggaagtctcgtcgtccatggagtaaacagcgtcgatgtgatcgttgctggtgaggatgtcggcgaagtcagcctgaccggcttcacgggtgaactgcgtagcatactcaacaatctccatatccggcgcaatctccttgatggtatccatgaagcccttcttacggagctctgcaacagaaccggaggtcggaacgtcgagaacgacgactttgccggtggtgccgattttatcgacaatgtacttagcgccttcaacacccatggattcgttatcgccggatacacggtaaacgccgtccgctgcgatctcgatatcgaagtttacaacaacgatgccctcatcgattgcttcctgaatcggcacttccatgccttcccactgcgggaatgcaacgatagcttctgcgccccaggacttgaggtcgtcgatctgagaagtcatttcctcagcgttgttgctggtgtagagcttgtagtcgacagtgtcgctcagctctttgcagcgctgctcagcgtaatatgcaacgcctgcgacccaaccgtgggtaacagccggtgcaagaatgccgatcttggtcttttccgtggaagtgctttcctcggaagacgcggaagactcggatgcttctgcagaggattcagagctgacagcactggattcctcagaggcagagcttgtggaagaggttccgttgcctgcgcatgctgcgaaggtgacgcagagaagcgcgagcgccagaacaatgctcaatacctttttcatgtgtgtttcctcctgtatctgcgatctgccgcagatgatctgaaatattttgagacgttgtgaataaactgtaaacgcctcatacactgggtattttactctttgctatatactttgtcaatgatatttcatgaaaattttacgtttttgagcggttttttttataagtggcgttctccctgccctatctacttgattttctgctttgcggtgtgataaaatatttgggaatatggggcgggtttgcgctttgcagctttttaacgcctcgctctactcatcgttcgggaatcccctaattgggtttcccgagcaaaacagtccaccggactgttttgcttcccttcctgatttttggataggcaaaaagatttcgtcgtctacggacgacgatttagggcgccgccctaaaaaaccgcaaccgaacgtgtgcgttcgctttactttagcttagatagcttcaatattaaataattgaaagtgtgtttttatggcaaatatcattcccatcacgtccttttccgcgccggaactggacgtttttgcgcggcttacggaaaaccagcttgtcaaccgcgccgaccccgcaaacgcaatgttcattgcggaaagcccgctcgttatcggccgcgccttagacggcggctgcgtgccgctctcttttttaatggaaacgaagcatgtggaaggcaaggctgcagaaattctatctcgctgccccgaagatattcccgtttacacggcggagttggacgttttaacacaactgacgggctttaagctaacccgcggcatgctctgtgcgatgcgccgcccggctttgaaaagtgttgcggagatttgcacaaatgcgcgccgcattgccgtgctcgaaaatgtgatgaatcccacgaacatcggcgcaatcttccgcagtgcggcggcgctcggcatggacgcggttttattgaccgccgccggcagcgacccgctgtatcgccgcgcgagccgcgtgagcatgggcacggtatttcaggtgccgtggacgtatctgccagaagacgtttcgtggcaggatacgctgcacggtctcggctttaagacggccgccatggcgctgcgcgacgacacgcttcccctctctgacccgcgtttggagaaagagccgaagctcgccgttgtgcttggcaccgaaggtgacggccttgcaaacacgacgatcgagcattgcgactacacggtgaagattcccatgtcgcacggtgtggactcgctgaacgttgctgccgcaagcgccgtggcgttttatcaactcggcacactgcacaacaatgtatgagaaaaggacgctgcccaccggggcaacgtcctttgttaccacttttcgaaatgcacgcggttttcttcgtagcggctttcacgcggttctttattctctttcgcgggatagccgagtgcaagaatggaatgcggcacgatggtctccggcaggttaaacagtgcggcttgcttttctacgcgatccatctgcggccatgtgccgagccacacagagccgaggccgagtgcatcggcgcaaagcgtcatattctgcgcggcaatggcgccgtcgatgacccaatagtctttcgcgggcgggaatgcacgctcgagatcgccgcagatcagaatggcggccgcagcctttttcagcggctgtgccggtctaccgttcgcctctgccatttcaagcagcttttcgcggtcggtgacgacgatgaacgaccaatcgcgcgcattcacgcagcaaggaccgctcatgccggcctctaaaatccggtgcagcttctcttcttcaatgggctgtgcggtgaaatcccgcacgcttctgcgattaaaaaggttttgcaaagcatccatacgggcacgctcctttatgtttttcaaagtcgttttgattttaccgttattctaccacgcaagaagaaaagttacaagtgaaacttttctgaggttctaaaagcactgaagcaccgttatattggaacttcactgttttattttggatttatcgcaacgcgctgcggtattcagcgggcgtcatgtgctttacttttttgaacgccgccgcaaacttactggcgctgtcgtatccgacctgtgcggcaatctcggcaatgttccggcgtttttcacgcaacaaaatttccgccgcgtaattcatgcggtaatcggtgagccacgcgccgatggatgtgccgtacgccgccttaaagcaggtcttcattggcgtcagcgcaaaatcgaaccgtgcagaaagctcctcctgcgtgaagttttcggagatatgctcggcgagaaaatcgcgcacggccttggttttttcaagctgcgtcttataaaagtacggatgcgccacgttttccttcggcggcgtcatgctgtcgagcgcgagcagcagctccagtattttgatttgaaaataggaaatacgtgctttttccggcacgcggtacatttcctcaaagatgtgcgcgacccgctccgtgcacgcaatgaccttaggcatttcgttcagcgcaaagcggcgcaaaatcgccgccggggtaacggaaaagcccgccatgacgttcggcagggaccacgaggcctgctccgggtcgagcgtgaccacgagtccatggtaatggccggagggcaagtctagcttctgcgagcatgacgcgccgttttcaagcttcatttcaccggcgctcacataggaaaaagcgccttctcccaacgcgtaggccatgcgcccttcgcggcagtgctcgatcgtgagccgcatacggtcgtcggtctttccgcatacgcagtgcgtcatgtgcagatctcgaaaccgaagctccacacccggaaaaatggtatagcatgtcacagtgccctcgcccgtctcgttgcgcagctgccacacggcacagccgtcactctccgcaagcagcatcgtgttttgctcttcttgttgtattgcgtcacgcatgatacgcgccccctaacattatgttctgactgcgggaaaagaggccgttgcccgcgtgcggcattgtattaaaagttagcaatttctaactcgaattcaaaaataaaagtgaaattttcgctccatttggtcttttcgccctattttcttgctagtaatcctttatgcgtatgcgccaaaacagaatttctcggttcacggttgacttctgctttaatttcatgtatgctatattcgaaagttagctaaaactaacttattcgatttcattgcatacggaggatacatatggaaacattttacggcatattgattccgcttcttggcacctcgctcggcgcagcgtgcgtgttcttcatgaaaaaatcgctcagcgatcgcgtacagcgcagcctgaccggctttgcggcaggtgtgatggtggcggcttcggtatggagcttattaatccccgccatagagcaatccgcagcgctcggcaagctctcgtttctgccggcagcggtcggattttgggcaggcgttttgttcctgcttttgcttgaccacaccatcccccacctgcaccgcagcagcaaacaggcggaaggcccgaaaagccgactgcaccgcaccacaatgatgatgcttgccgtcacgctgcacaatattccggagggtatggccgtaggcgtggtgtacgccgggtacctttccggcagcgcacagatcaccgccgcaggcgcacttgcactttcgctcggcattgccattcaaaattttcccgaaggcgccatcatctccatgccgttgcacgctgaaggcacgaaaaagtcgcgtgcgtttttggacggcgtgctttccggcgcggtggaacccatcggtgccgtgctgaccgttttggctgcccagctcattgtgccggcgctgccgtaccttttgagcttcgccgccggagcaatgctgtacgtcgttgtagaggaacttatccccgaaatgtcacagggcacgcactccaacatcggcacggtgttttttgccgtgggctttaccgccatgatgattttagacgttgcgcttgggtgaacggtgtgaatgccattttaaatgctttgctcttttcagccttaatgactccgtttcatcatgtaaaaggttagtttgttctaacccgcaaatctattatagcgcgccattcaaaaaaaatcaagggcataccgcaaaagcatttcatctttaatgcggtatgccctgttttgatctcctcgaatttttcaaaagttcgcatatagcaaaaagtcctgactttccgaagaaaatcaggactttggtggagcaggggtgctcaaggatgaacacccctccgaagctccggtttcgccttcaaatgccgtttctatattcagttgtactcagcccacatttgcgggcctttgcttgaatcttctctttctctattgccgtcacacggacggcaatacgaacatctttccccatacatatctctcctttcgggggattggggggctgcgcccccaaagaggcagccgatttcggctgtgattgggacttctgtggcacacaaattccctgcttgctatgccgtaggacgcacggcaacagcgcaccctcaaatccgggcataaaaataacacctaccgatttccgataggtgttatccgacgattttgccgccctcaaagccatagtccacgccggcataggcttcataggcctgtccgatcttgcggttgcgaaatagctcctgcgggttccgtggaatggcgttcagttccgccccacagcgggacaggatgcttttcgggatgaagtagtagaacgggatgtactctgcgtttcggaacggcgtaggcgggccgtcctttctggtcagcataattggcatttttatcgtctcctttccagagggccagcgccctctattttttaacggcataagcaaacgccgattgttcctgcttttcaaaaataattttagcataggtgctgtccaataaaaatccctcattagagaaatgcttcaaaaacattttttaaagaacgggatgcacacttcactgccatataaatgtgttgtaaaacaaaattcaagaatatccgtgcgttctctctgctatccgttggaattcggcataatcgttcaccttaacaatattttatcgtgccggttgcggctgtggaatgaccttattatactggtaaacaagcatgattgttctggttgtggacctgatttaataggcgaatcattgcttaataaataagaacaaaatataatatagcttagagatgaacagatacgactaatatatcaaggggtttcttaacttgccaaaattcagccccaagatattgcaatctgtgagaaattaggaaaatcttaatgttttctcatgaaataataaggatgtgctgtgtttgactttgataatataataatatatactctttgaagggagagtgatttcatgtctaataaaatattagtagtcgatgacgaaacagaaattgcggatttaatagaagtctataagaaaaccaccgagaaaagtccgtagtagactgatctcggtgattttccttgccattgctacgcctgacagctaagttcttttaacttttcgttgtcaacccgtggctttgcaactcggttattcgcccattgccgattcagctgcggtgataatttgatttactgccttatcaacgaaaaccgaagaatttgcaggatttcccgtattccgctggcggtgctgtccacccccatccagaagctggagaacatcagccgtctgctgaacaccaacgtgtacatcaagcgcgatgacctgaccggcatcggtctgggcggcaacaaggttcgcaagctggagttcctgctggcggacaccaagcgcaagggcgcggagggggtgttcaccaccggcggcgcacagtccaaccacgccatgctgacggcggcctgcgccaagaagctgggcatggagccgatccttattctgaaaaagcgcggcgttaccgagcgcaagggcaaccagctgctggaatatctcatggatacggatgtgcgcttcacggataccgacagctatgatgatatctatgcggagatggatcgtgtcggcaaggccagcggcaagaagtattataagatcccctgcggcggctccaacaccatcggcgcgctgggttatgtcaaactgcatgaaggagatcgccgacacggggatgcactttgactaggtctgctgcgccgagggcagcggcggcacccacgccggcgtggcgctgggcgctatgctctatatgcaccagaccaagaccgtgggtctgatggtggacagcgacccctttgaggtcatcaccaccatcatcatgcaggagaccgccaagctgctggagctggacttcacgcccacggcggagaacgtccacctcatcgatatgtgcggccctggctacgccatcccctctcccgagggtaacgccgccatccgcatgatggcggagaacgagggtctcttcctcgaccccgtctacaccggcaaggccttcgccggcctggtgaagatggcccgcgagggacagttcaagcccaccgacaacgtgctgtacctctactccggcggcgccggcggcctgttcgccatcgacatcgagctggactgagtcgccttagcgggcgcaggcttttaaatccggttatcggttgtcatcaggcgggtatgcctttcccgcacacatagagcagcacccaaaagaacggccggaggaagctccggccgttctttgcacagcgggaatgggaaagcgtatggaaaaatcttgccgaagcgcttgtcgatacggcgagcgtttttgtatttctgtggttgtaaagctgccgaaaatggtgtagtatgtaggcggatattttataccaatccggaggtggactatgcagatgaccgtgccgcgcccgcgtgaacaggcgctggagcaaatcatggcgtatatattggagaataaactttccgctgacgataagcttccgccggagcgtgaaatgtgccagatgtggggggttaatcgctgcaccctgcgcagcgccattgccgccctgacggagcaggggattgtgtacgccgttcagggcagcgggacccgtattgcgcacagatttcgccgtatcctacaggatttgcagggattttcggaatacgccgccgattgcggcctgcggcaggaaacgaggctgctgtccatgtcgcaggtggagtgcgacaagcagctttcccggcggctccatctggtgctgggagaaaatgcctatcgaatctcccgcctgcgcattctcaacggccagcccacccttatcgaaacggcctatattcccgccgcgctggcccccggcctggaggagcatgatctggtgaccggctccctcttttcggtgctgcgggaggggtacggcctggatctggatcacggcgaagagaaggccagcatcaccacagccgcagaggaggaggccgttcatctcggcatcgccgccggggatcctgtgttctggatcgtcagcatcacgcaaacgccggagggcgttcctgtggaatattgccgcaccgtggcaagagcagacaaggtggagctggtcagcgttctccaccgcggagaaagcgaggcatccgatcatgcgtgaaatcagctataaatccccgctttatatccagctgcgcgaggtgatccgcagtaagatcgaagaagaagaatacttgcccggcacagccataccctcggaaaatcagctgatggagacctatgggctcaatcgggtgtccgttcgcagtgcgctggcggcgctggagtttgagggacttttgaaaagcgtgaagggaaaaggggtttttgtagcggggcccaaggccaaacggaatatggatacgctaggcggttttcacaacaccatgcgccagagcggcggaaacaccgccacacggattctcagcaagacgctgcgtcaggcaggcccctattatgcccgcctgctggagatttcccccgagagcaccatctggtttattcgccgggtagaaaatacggcgggcgagccggtggcgctagaggagctttacattccctacagtgtggtgcccggtctggaggaggtggatataaagctgttctccatctatgacatctatcagtggaacggcatcgtgctgggagagggacatcagacgctgcgcatcacccggctgccgcctatgctggccaagcacatggacatgccgccggagcaggcggtaatggagttttcatgcatcacccgggatcggggcggccgggtggtggagttttcccgctgctatgtgcgcaacgataaggcggagtttgtcgtccacttccgtcacacaaatccataattggtataacttttaatattgcaactatcaatacaggcggataaaacgcgttatccgcctgtattttttaccattttttgttattttaaccaaaattgccggggctgattttagccgaaacatagaattcacgttttttgccgcaaaaaccgattatcatcttgtaattggtataagttgatactatacttatcacatcagggcaacacaacgaaaaaaggttgagaggtgggccacttgtccgattccatcgtatcgctgcgccatgtggaaaaatgatattgcaacaaccacgtggtaaaagacaggaatcttgaaattcatgaaggcgaatttctgacattactggggccgtccggctgcggaaaaaccacaacgctcccgcctttaatttcgattacaagaccaacgtcttcttccagaaggacgtgggcgacgcgctgaccatctacgataaatactatcagatgctgaaggtgggttaatccatcgctgcaaaaatggagggatatccttggttaagtttgatgaacaaaaacaaatcgacagcgtaaacggtgctttggcattgcggccgcaaatcgaagagctgatcgaccgtctcctggcagagggcgtgaaaaacctctgctggctgggcatcggcggcacatgggccagctgtatgcaggtggtatgctatctcaaggagcacaccaacatggataccttcgccaccaacgccgcagagtattgcaccacaggcgataagcgtgtgggcgcgggaacccttgtggttctctcctctgtgaccggcaccaccacggagatcgtggatgcggttcgtctggctcagagccacggcgcaagggtgctggggttcattgacaagccggatgctgagctggccactctggtggattactgcatcagctacaagggcaatgaacagctgaagttctttatggtggcggactgcttcctgcgccgtcagggcaacttccccgactatgacacctattatgcccagatggacgcctatctggccaaggatctggtggagattgagaagattgccgatccctttgcggaggactttgcccgcaagcatctggaggacaagctccactacttcgtgggcgccggctgcctgtatggcgccacctattcctacgccatgtgctactgggaagagatgcactggattcggacgaagtccatccacagtgccgagttcttccacggtatgctggaaatcgtggacaaggatacgccggtcacggtctttgtgggcgaggatgcccagcggcccctgggcctgcgtgtagcgaagttcctgccgcggatttgcgagaacttcaccattatcgacacccatgattatccgctggagggtatcgatgagaagtaccgcggacggatgtgctatgccattatgcacgcggtaaccaatcgcatcgacgcccatgtggaagccatcagcggccacgacatggccattcgtcggtactaccggaagttagcgtattaagtgaaaaagggcgggttcccccgcccttttttcagaggtttgcttatgaagtttgggatgtttaccagcggttatcagcgtctgccgctggaaaaatgctttacagacgctgcgcaactggggtatgattacatagagctttggggcggctatccccacgcctttgccccggatgtgatagaggactatcgggagatccgccgcttgcaggagcattacggcattcccgtgcctgtctatacgccggagcacaatgcctatccctataactatatgctggggacggaaaagcagtggcgcaattgtatggcgtatctggaggtgtctgtccgtgccgccgggctgatcggcgccgggcagatgctgatttccgtgggacacggcggcgagtgcccggcggaattgcgccgcgcacggctgcgccgctctgtggagcatcttgcccgcgttgccgaacgggagcatgttgtccttctgctggaaacgctgtcccctctggagagcaacacctgcacacggcttcatgagctcaaggagctgctggaggcggtggactcgccgtggctgatggggatgtgcgatgtggtgccgccggtattgcagggcgaggacccggtggactattgccgccatctgggaagcagaatggcccatttgcatctggtggactgcgatggcgtgacggaaacccacctgatccccggagacggtgtattgaacctgaaacagattgtcagcgacttccggcaggcgggctatgacggccgcgccacgctggagctggtgactcactatatggacgatcctaccggcgccgcaggactggcgctgcaaagagcaaaggagttattatgataaaaattgcgtgcgcaggcgacaactgtgtggattattatgacaacaccggcgagagctttcccggcggaaatccggtcaatgtttcggtgtatgtaaggcgtctgggcggccagtccgcctatctgggcgcggtgggtacggatgattttggaaaacagatgtgcgccgcgctgcaagagaagggcgtagacgtcagccatgtgcagattctgcccggcaaaactgccttcacccatgtagagcgcatcaatggtgagcgggtattcggcgattatgatgagggcgtcatggcggatttcagactccggcagacggatttcgacttcctcaagggatacaatctgctggtcaccggactgtgggggcatacggaaagtcaactggccgacgttcgcgccatggggatccccgtggcctttgacggggccgagcgcccgctggatgaggcgggcaggatcgcgctgccccatgtgaacgtggcgtttttctcagatgacgcctccgatgaggaaagcctcaaggcgcggattctggaggtagcggcgctgggtccccagatcgtggtggccacccgaggcggaaaagggagccttgcctatgacggcgaaagcttctatccgggccagatcgttccgtgctccgtggtggataccatgggcgcgggggacagctttattgccggattcctgatggcgtggctgaaaaaggagtcgatcccggcctgcatgcgtgccggagcggaaaatgcagccgtaacgctgggctatcccggcgcgtggtgataataaaggagcgaatcaacacggaagaactgctgtagtctttacaggagctgctggcattataaggattatcaagcatagccgccaagctggcggcgaactgcccgccgggtatccgcacgcggcagcgccggtcaccggtacggataaggccggtgtcgtggatatcgctctcatcggtagacagcaccagcgcgcagacccggtcggcgttccggtaggagtgcgcccactcgcagccagtggacaggcgcagcagcgccagcattagaagcagcgaggcaaccaccggccagaagctgtggaaatgtgtgatgcgcctgattttttcattgtttcatattctatgcatggcaggaagcaggagactaaataagaaatagtagcggtattgtagaataaaatgtaacaatattacgactatattataccattttcgtgctccagacgcaagttcacagatatgcacgaatcgatattatagtaaaaaagcgccgcctcgggattactcccaagacggcgcttttctgttgcggatcagagcgaacactttgcggcgaatccgccgctgaagaaataggtgttcgtccaatacctgtttggtggagacggacgggatcgaaccgttgacctcttgaatgccattcaagcgctctcccagctgagctacgcccccgtttggtacttgaagattataacacaggcggttacaaatttcaagcccttttttgttttttattgatctttttttcgcaaagcgaaaaatatcgccgtttattcgatgctgtgaatgcggtatgttccgctttcggcagctttgtaagcgaggccatcttcaaagacatagccgctttcaagacgaataacgccgtgcatggtgcttggcagctcgaccgtcaactcaatgacgtcgtccgcatccctctcccatgcggaagcgatgcggcctgcgggtgcaatgtgaaacgcttcggcatgtgtgaggcgcgagatgaacgacgggcggaaatccacctcattcggttcaccgtgcggcgccatgcggataccggagagcgcctgcgtaaaccagctgctgatgtcgccccagaagtggtgattcagtgagccgatgcgatcactgccctcgggctgaaacagctcccacagcgtcgtggcgccgcgtgcgatccagttgccgtaggacggataatccgggcgggtgatcatggagaacgcgaggtcgctgtacccgaaatccgtcaaaacatggaacagcacacgtccgccgagcacgccgacatcaaggtgatactctttttcttcgatgaggttgatgagctgctcaaacgccgccttgcgctctgcgggctcgaagatgttgtagtagatggccatggcctgcgaagtctggcagttgccggcagcgagcatagtgttctcgtcgatgagatacttgcgcacggcagctttccagcgcttagaaagcgcgcgggcaaacgccgcctgctccggcatatggagcttatcgaacagaaacgcggctttatccgccatgtcctttgagagcaccgtatcggtgaatgcgagcggcgatttatattcgtgcgcttcgcgtcccggcgggcaccagtcgccaaggccgatggcgagcaggtcgtgctcgtccatacgcgttgtgaggtagtgcaggtatttgatgattgccggggcgcacagtttgacggaatccaaatcgccgcggtactgatacagtctgtacggcagctcaatgagcacgcagtcccatgcggggccgttgccccaagcaaagccccaaccgcttgtgggtacgatgccgggcagtgcgccgttattatcctgtgctttcacaatggcacgcagccattcgcggtagctcttttctgcgccgaggttcaacaaaatatgttcggaagaaagtgccgcgtcggccgtccagccgtttttctcgcgctgcgggcagtccgtcgggaaataatagaaattcgtcacgtccgattggcgtgtcatttgctgcaatttgtttgcggtctcatccgagcaggagaaaccgccgcgctcttcgagcagcgagtgcatctcaagcgctgtaagcaggtcttccgtcgcctgcgcttcggtgatgccgctgacgagcacataacggaaaccgtgatacgtaaacgccggtgtatatacctcttccccgtcgccgcggcaggtatacacgtctttgtggacatattcgaggtcgcgcgcccagtgctcacgcttaaaccagatattttccacgtccggcaggccgtccttcaagtgctcgccgtgccgaagttctatgcgctggtcaagctcgccgcgcacgcacaagcggcacacaccggcggtgttgataccgaaatcgtacagatagcccttttccgttttcgtaacggagatgggctttaattcatttacgatgtcaatcggctccgcggtacacaggcgcttttcgccgcgcggctgcggggcgcgttcggcaaattcccatgcactgtcgtcaaattcgatcgtattccagccgggtatttccaagcggccgtcgtaaatttcaccgaagcgatagtcatcaaacagcagcggagacgattccgtgcgccacgtttcgtcactttcaatgcaatgtgcctccccgcttttgtccgtgtacgtcaggcacagcgccatttgcggtgcggcacggaatgcagcggtgtcgaaatcccagatatgcccgccggggttattcgtgaagccgttgccaagccacacgccaagcacattttcgcccgcgcggagcgtgacctcatacgtatcgtaatacacaaggtcatcgggattgctgatgtacggcgcaagacgtccctttgtgatgcgttcgccatttaaatacagctcataaaagccgagcgccgtgatgataacgtttgctttggcttcatgatcggcttgaaatgcgcggcgcagatacggcgcaggcacgtggtgttcaaatgtattgtaagcttcggatgcgcggataaaagacttcggaaattccattttaactcctccaaaaaggactgaattcctcttttatgactgctgtttcgcttttgattcggttgtgggatctacgtagacggtcttatactgcacatagatgaccatgccgggctttgcgccctgcggctttgaaacatagcggatctgcgtgtaatcgaccggcacctgcgcggaatccttcgcgcggctgtgctgcgcggcaagcacggcggcttcctccatggcggtctccgtcggtgctttgccgtctgtgacgagcaccgtgtgcgagccggggatgttcttcgtgtgaaaccaaatatcgttgttgtttgcgtccttcattgtcagcttgtcattctggcggttattgcgcccgacaagcaccgtgaagccgtcgctcgtcttgaacttgagcggtgcggaaagcgcaggctgcttctggttctttttgcccgccttgcggcgcacgtagccctgttcggcaagctcggcgcgaatctcatttaaatcacgttcgttttcggcgagggcaagcgattcgaacacgctgtcgatatacgtcagctccgtctgcgcaaggccgatctgctcagtcagcttttcctccgccgtttttgccttgcggtagtttttatagtatttctgcgcgttctgctgcggcgtgagcgccgggtcgagcgcaatctcaagctccgccaaattctcatcatagaaattttgcagctttacggatgtttcacccttttgaatcgcatacatattcgcactgagcaggtcgcccttgatgcgcagtgtgtcgcgctcggcgcatgcggaaagctctgcctgctggttcgcgatcttgcggctcaaacggtcggcgtgattcgcaagcagacgcagaagatcctgacttttcacgcgcatacgctcaatctggtcgcgctcggcgtagaacgcgtcgagcatttcggaaaagctctttttttcactgaccgtcatcgcgctgccgtactgacgaatgtccataaacgcgaaatctttcggtttattctgtgggtcgatgacaatatgcggcgtgccggaaacgtttttcgccgtctccatcagcgttgtcacgtacatctccgtacggcggcgttgcgggggcgtcatgcttttcacatacacctcatgccccagccccgcgctgttttcgacttcgcgcgcaatgatcggcgaaatgccctgcaaaacggacatcaacgctttggaaagctccatatcacgcggtaaagcatcgatacgcgccatgatctcctccaccgtgcaggtaagcatggaaagcttatcctgcgggggcggcaggcggtataaaagcccaggcaacacaagacgctccgaagacatctcggcatccacgcgttttagtgcatcgatgattttgccgttttcatcaaccaaaatgatattgctgtaccggcccatgatctccacggcaagcgtcagctccacgtggtcgccgagctcgttcacgctgtcgaatttcagcatgagcgcacgctccaagtcgggctgcgtgatctccaaaagctttgcgccctgcaatttcttgcgcaaaagcatgcacagcatcggcggctgctgcgggttttccaccggaatcgtcgtcagattaatacgcgcactgtttgcacgggcggaaatgagcagcttatatgcggcgctgaagcctcgaaatgcgagaatcagctcatcgcggttcggctgaaacacacggtctacgcgcgtgccgagcaaggacgcgccgatttcctcttttaaatgtcgtaaaaatacaccatccagtgccattttataaaaccatcgcttttaaaaagcgcctttctgttctgtttcaaagcgtttccatcggcgggcgttcgctttcggaaacgataaattccacacccgggcaggctgtgtcaagataagctttcagccgctcgcggtacggcagctccgtgtggtagtgcccggcttcatacaaaaccagtcccgcctgctgcgccgcgatggcctcgtggtgcttcacttcgccggtgacgaacgcgtccgcgccctttgcctgcgctgcaagggcatagtctcccccggcaccgctgacgaccgcgactgtgcggagcattttgctgaccgccgtgcagcgcaccgccgaaagccccagcgcttccttaatgtgcgcagcaaagtcctccgttgtcatttcttccggcagctcgcccatgtaggcaatgtccgtttcgccctcttttaaaatgccgcggacgttttgcagccccagtttgcggcaaagcgcatcgttcacgccgtagggatatgccatatcgagattcgtgtgcgcactgatgaccgcaatgccgctctgcacaagcgcataaatgatgttctgcggctgcacggtacgcagcgggttaaagatcaccgggtggtggctgacgatgagctccacgccgatgcttttcgcctcacgcagaacgcgcggcgtgacatccaagcaaagcaacgtctttgtgacgtcgacattttcatcaccgaccagaatgccgacgttatcaaaatccattgccgtttgaaacggcgcaatacggtctatggcgtcatagatctctcgaacggtcatgcgttctcctcctcgccgtacaggtctaaaagcatttgcagcaaaatttccagcgcgctgctgtctgcgccgccgtgccgcatgcccttgatcttattttcaatgttgtgccgcacgcttttggcataacgtgcgctgaacggactgccgggtttgatctgtcccatatataaatcaatcagctttaaattatcccgcttttgatcggtatagtacacggacatcacggagtaaattttatcactatctactaccgcttcttcgcggtcaatcgtaaagcctagcgcggcaagtccctctctaagctgcatggcggtcgtcatcggctgcaaaacaaggtgcttatccatcgcgcacagccatggcgcctccgagatgatacgcaaaataagctcaccgcccatgccggcgatgacaatgtcctccgcctcatccggcagcaccccgtgcaggccgtctccacacacaaagtgcattttgtccgccacaccgcagcgtgaagcattgttcatggcgctttccagcggccctttgtgaacatcaaccgcaacggcaaacggtatcttgccgctttgcagcaaatagaccggcacatagccgtggtctgtgccgatatcggcaagttttttgccttcccgcacaaaatctgcacatttttgcagacgcgcgccaagggtgggtgctcgttctattctgttttgttccatgagttcctccgaattgccggatcggcgaatttgcttattttgcggcgaagcgcgcgttaaatgctgctgcgaactgctctgcatccacaccgtgcaccgcacaggcctctgcgattgtttcgccgcgtgcggcgggacattcaatgcaatgcatgcccgcttccctgaaaaacgctgcggcatctgtctcccgccgcagaatatcgccgatgatggtatcaaccgtaatgtgcataaaacatccccctttaaagatatttaaccaatttaattatacgatgcataagtttgttttgcaaggtatatcacggctttccgcgtaaatatcgtaaatatttataaagcaatatttgtctttgaactgcaaaatgcccggcagtctcccgccgggcaccgatatgcgttttaaagcttatctttcttccttcatgcgtgcaaagcactcgctgcaatagaccggacggtcctcacgcggcttgaagggaacggttgcttccttgccgcaggcggcgcagacagccgtgtacatctcacgttccggctttgctgcattcttgcggttctggcggcatgccttgcatctctgcggctcgttctcgaagcccttggatgcgtaaaattcctgctcgccggctgtgaatacaaattctttgccgcattccttgcagatcagggtcttgtcttcgtacatgtgtttttacctcgctttggtcataatagaatagaatgagttttgcccccggcggatttgcaccgcttcattgaaaaacaacgccatcaactgtggaagggcatatacatataaatatatagaaaaggtatccgcgcgaaagtcatcctttggcgtcattgtttttttgccgcagctttttgcgtacacgcgccatcgcgttatcgaacgcacgcgccgaaatgccgagttttctctctgcttcctgccgcttatagccgccaagatataaagaaagcacacgcagctcaaaatcggaaagtgaaatatggataacagaaagcagccggtccatctcgtcacggctctccaaaagcgtttgcgggtcggaaaggcggtctgccccaaggtcttccatctcctcaatgggcacagcgttattgaggaaagaatttttcagactggagctgcgccgcacggcgctgacgattcgattgttgatgcaccgcccggcatacgtttcaaaagacgtcctttcgctcggcttataggaattcgccgcgtctaaaagccccaaaagcccctcctgatacagatcttcccgctcaagggaaaaaatctcgcgaaaactgcacgccttgatgcggatgaccttcaggtagcgcgccgcaagctccgaaaacgccgcgtcatctccgttttgaaaacgaagtgccagcgcctcatcgctgagcggtatactatttttctgcccggtttcctgcatgagaacgctccaaatgactactgtttctttatcatactccaaacccttacagaagtcaagacaaatcttcctatactgtacaaaaatgctcgaccgaatttttacatttatatctatcctgcaaacttaaacttctattgccaaaattcaacaaaaagtatataatgcagacaagaactgcgaaaggcggtaaaaatatggtatcaaaagcattcagcatgggacttttcggcatgcacgcgttcaaagtggaagtggaatgtgacctttctgccggtctgcctgcctttgaccttgtcggcctgccggacgccgccgtaaaggaatcgcgcaatcgcgtgcgcgccgcactgaaaaactgcgggttcgatttccccgtcagccgcatcacgatgaaccttgcccctgccgacgtgcgcaaagagggccccgtttacgacctgccgctactcatcgctttattgaaagccaccggccagctgaatgtcaacacggacgactgcatttttgcgggcgagctttcgctttccggtgcgctgcatcctgtgcgcggtgtgctctccatggcaatagaagccggaaagctcggctacacgcgcatgtttgtgcctgcggaaaacgcctatgaagccgccgttgtgaccgggctttcggtctaccctgtgccggacgtgttcacactcatcgaccatctgcgcggtacaaagccgctcctgcccgccgcgccgtaccacagcgatccgaaaaatcagccgccgctgccggacttcgccgatgtaaaagggcaggcacaggcaaagcgcgctttagagattgccgcaagcggtgggcacaacgtgttgctcatcggctcgcccggttccggcaaaagcatgcttgcaaaacggctgccgtccattctgccgcaaatgcgctttgaggaaatgatcgaaacgaccgaaattcactccgttgcgggacttctgccgagcaacaccgcgctcattgaaacgcgccccttccgctcgccgcaccataccatctccggcccggggctttcgggcggcgggtctatcccccgccccggcgagatctccctcgcacacaacggcgtgctgtttttggatgagctgccggagttttcgcgcagctccatggagacgctgcgccagccgctagaggacggcattgtgaccgtctcgcgcgtgaacggcacggtctcttttccgtgtaaatttatgctcgtcgccgccatgaacccctgcccatgcggctattacggccacccctcacgcccgtgcacctgctcggagaccgccgtggcgcggtacctcggccgcgtttccgggccactgctcgaccgtatcgacctgcacattgaagtgccgccggtcgattttcgcgacctctcgaacaccgcaaaggaggaaagctccgcgtccatcaaagtgcgtgtggatgccgcgcgggacattcaaaacaagcgttttgcgaacaccggcatcacctgcaatgcacagattccgccggaaatgctgcatgaagtctgccgcaccgcgcctgctgccgatgccctgctgaaaaacgcatttgaaaaattcgggctttccgcccgcgcctacgaccgtgtgctaaaggtttcgcgcaccatcgccgacctcgataacagccgcgacatcgaagcgcgccacgccgccgaggccgtgcgctaccgcacgctcgaccgcaaatactggacgagatagaattatacaaactaaaaagcagttcttcctcacggaggtcacatcgcgtcagctgtgaaaattctgtcgtttacttcaatactccacttccttgtatttttccgttcatcccgaaatttccttcaaaagcgcagtgcagccttcataaacatcgcgccaggtcgcttcaaaatcgccggtgtaccacgggtcagccacgtcgccgggacgattggtgtgctccatcagcaaagagaatttatgctccgggtcacctccgcaaatacgctgcatgccgcgcagattggaactgtccataccgatgatgtagtcgaacttatcataatccgcacgcgtcatctggcgcgccgcatggccgtcgcagcgaatgccgtgttccaaaagcttgcgctttgcgggcggatacaccgggttgccgagttcctctcggctcaccgccgccgaagcaatctcaaatgcgcattttttccccgcttttgccgcaaggtctttcatcacaaactccgccatcgggctgcggcagatattgccgtggcatacaaataatactttaatcatctttttatatctccatttaaatcttgtatttcttctcaaacgcttgatatttcagggttttccgacttttgagttttcctttcttttcaaggtatcttctcaaatcttctcatattttcttatgcttttccctgcaatcttggtaaatccattggtaaagcaagcgtccttaccaacgggcttttttaactattcgctatccgatatacttcttcctttgcatcatcaaaattcacatgggtgtaagtgttcaaggttacactgatgtctgcgtgacccatgatatactgcaaggttttcggattcatcccggattttgccatattagagcaaaaggtgtgcctgcatacatgaggggtaactttcggcatctggatacggtaaatcctgttgtatttctgaatgatatgctccagatacttttcccagtgaagggcaaccatcggcatatcgtttttatccagaaacaaaaatcctgcatatccttccaccatcggttcaacttttggtgtcttgcggttggcaatgattctgcgaaaacacgctgcgacagcttccgtcatcggcacatagcggatgcctttgtcagtttttggttcttcaattacatactgcatctgtgcagtacgctgtaactgatggtctaccttgatacgcatttctccaaactcgatttctgaaaccgtcagtccacagaactctgagatacgaagccctgtgtgaaaaagaatatagattgcatcatagtatctgctgaaatgtttatcttcctgaataaactttagcaaatctctctgctgctttcgggtaatcgcttctctggtaacagaatcattgacaatgacggatgcaagctcaaattcaaatggatttttacgaagcaaatcatcgtctaccgccatctgaaatgctggtctgaggactccccggatagaatgaatggaactgtatccccgcccatcaatttgttggagcttaatcaaccatgccttggcgtctgacaaacgcaccttatcaattcgcagattcccaaaactctcttttttcagcatattgatgactgttttatatccggcaaccgtattgtgacgaactcctgttttcaatgaaacatacttttctaccagttccaaaacagtatagttgcctccgttggttacgatacggtcaaacaaatccgcttcaatctgtttttctttctcacgcagggaaggctcccgcttcttcccttttggcattgggtcattcttgtccaaacgccaactgtatacatttttctcttttccgtcctcatcaatatagcggaaccgatacctcccatctttacgctggtactcgccctctcgcaaaatccgattacggttatctcgtcttttctcactcatcgtgaactctcctttcaaaaaaagagagccagacttgcactcttatcatagcacaaatccagctctccgcatagttatatcatgtgaaatcggtaaatctgtcagctctgtttacacagcagtagcctgatccagatacctctcaaatttctcacgcttaatgagggcacgattgccgttcatcacataaaaatcctcattgggatgtgtgtcaataagcgttctcaattttccttcgccgatatgataatatctggctgcttcctcaatggtaagcgtatatctacgccacaccggaatatccgagtaattttttccttcaatattcagcttattattcgccataggcagttatcctccatacatgaaaatagccagacagagggtgtcggcaacgaagtccggcaacgggcttcaaaagaccttgcaaacaatctcaatctggcgatggttactatttatacttttgttttatttttctgttgttttggttgttataagggagaaaagcccggaaataaggttttttccccgacaaccggctcggcaacgggatagcaacagggggtgcaacgggctgtcattttcagaatggaagctccatctgttctgtgatctccacaaaaccgtccattgttttttcagacgggttgcataagtccgttgccgggttttcacgctcccagcccttttgtctgccatattcggaaaacattcttgggttcgggaagtaccgccagccggaaatgcactggttcataatctcgttgatttcccggatttcccattgcttcggctcgtcaaaagcatggttcaaggcttccttatagagctgcttggagcagaccatgctcccggtgtacttatcaagatacgcctgtatcatcccggctttggtgtcctccggcataaaatcccgctggtgttctttgagataccgctgcatggcggggctgaaagccagcttgaacctgccgcttcgataaatctccatcgcttctgcccacatctgcccgatataggctctggaagcagcttcgtcctccaaaatgtgaacctcggcttgctccgggtaaaccatgacggggataaagcggcgattgccggaacggtcaaggggcaggaagtcaagagcattggaagtgccgccaaacacgcactgacgggggcggtctgccgggtgagtttcatagggtatcttgtaaacctctttctgtcggcttaaaaatgacttgatttcctcaatgctcttagcgttggcggttgccatcatttccgacatttcgataatccagtgaccttgcagcttgcggtacacattgtcatcgtccagcttccgcaaatcatcggagaaccactcatcccggactgccagcagacggaagaaggtggacttgccagccccctgaccgccgaccagacagagcatgatttcaaacttgcaccccggctgaaaggctcgtgagattgcacccagcaggaacagcttcaacgcttcataagtgtaatcgtctgcgtcagcccccagaaagtgccgcagacagaagcgaattcgttctgtaccgtcccacacaagggcacttaaatagtcccggatgggatggtacttgttttcattcgccacaatcccgatggcgttatcaatctttttctcattggtaagcccataggtttcttccagatagagaagcagatacttcatgtccgtatcgttcagggcggtgctttctctgtagaagccgatgggctttatgatgtccttgcggtcggtcaggatgttgtatgcgatagccccggaaagcagcgggtcacgctggaatacggtcaggcagttccgtatgctctgacggacaccgcctttctcggtggtttccagccccgccttgatttcctcaatgctctggggcggctgcatggcgttcatggtgttttttagttcttgctgcgtctgcggctgcaagctctgccattcgctgttcaagctgtatcacatcctttccgtattccgtaatcaaagccgctttttcctctgtttccccgaacagcagcacatccagcagatattccacatggtcttgcttctgtaaggcttccacaaaccggggatgaaagacttcctccggggagtgcggggcatattcctttctccacactcggagtaggtggagataatcggcaagaatacggaagcagcggttttttgcttcctgaaactgttcctccggggatttctgccggggcttgggcttttttgcttttcccggcggtttccagtcctcataggaaagcccgaagtcctgtgccagctgtacggcggcttctttctttcccagcccatacagggcggcggcaaaatcaatcacatccccatccgcaccgcagccgaagcagtggtaacgccgatccagcttcatgcttggggttttatcgttatggaacgggcagcaagccatcccgttccgacctatatggattccataatgctccgcagcctgtcttgttgtgacggactgcttcacagcttcaaatacattcaaatctatccctccttgaaaataagaaaagcacctgacattctcaatctgaaaatggcaagtgcctgttaaagttccatatcctgttgtctgtgtttcgcctgtgccggggcggttctttgagcctttttctcgtctgccttatcctgtaagacttctttgatgggctgcttcttgggcggctctttgctttcctctgtgccgggtgtggctttccgtacccagtatcggatgtcccgcagtttcttcaaatcatcctgtacctcggtcagcgatattttcagggctgcgatttcttccagaagcgtttcctgttcctgttgcagcttcttttgggtgctgtccttatcgtctgggtgcttggcaaggtaggcagcggctttctcataccgggcaacctccgggtgttcctgcttgaatttctcctttgttttcttaaaaaatattttctggtacttttcataaacaggcttacattccttgcaggctgtccggctggcaagaatcccgtcaatcactttgctgcgggcttcctttggcttcatctgattgcggtaatctgcggctgatttcccggaagattccagaaacgcttctaagtcctccacagtggaaagccccttttgccggagataggacagggcttcgctgactgcctttaagtcctgtgaagtcccccggttctgtccagccctcgtccagtccttccgttcttcctttcgtatctccatgtacttcatcagcagattgggaagaagtgtcgcttcctccgccgctttttgtgcaagcagctctttccgtttttctcccagctcggtaatccagcctttgagattttggataagctgccggatggacttcatcagactgttggcggctctgatttcccggttcaggtttccgatattcgtctggataccacgcttttccatctgccggacagcagccccctcatggacagtggggacaatatcaagcccctgtctggcataggaacgcaagtccacacgctccgggcggtcattggcttccagatagcggttctggatgacctcccattcatgccgccagatttcacaatacttctggtcgttccagtccaccgtatcctccttgtggcttttccacctgccggatggcagctttatccgttccccgttctcgtcaaggtcataaaccttgcggctcttggaaagccatttcccatgttcgtccattgccctcatagtgagcaggacatgggcgtgaggattgtgtcccggcgggtgggggtcatggatggcaaagtcaacaatcatccctttggaaacaaactgctgttcacaaaactcccggacaaggacagcatattggtcgggcggtatctctctgggaatggtaagcacccaccgccttgcaagctgggaattccattgcttctccaccgcttcggcggcgttccataaagtattgcggtctgcatacgaccgtggggcgtttgccgggagcaggatttcattgtggacgataccacgcttttccgggtagtgcttcacttgctggtcgtattcacagaacagcttttcgccactctggtaagcggcggcggcaacagcagactgccgttggctgcgttgaacaatcgtgatttcgttgtgtggacatggcattttgtgtccctcctttcggtaattggtggatggggtggcgttttaccacctcattttgggcagaaaaaaagcaggagacctttttcagatttcctgctcggtgtgccgctgtatgggcggcgggtatttagttgtagaaatacatcaatttgaaaaatcaaaactgaaaacgaatatcttctttgaatttgtgtcgtctgggattcccttcacttcgataaattttgtgtcgtttcatatcataaataactgaccagacagtatctttacctgtacttctgtcatactgacagaggaaaccataatctccagacaacagtttttctgcaaatggaaaattgaaacctccatttttttcgctaaaagctgaatacaatgtttgataccgttcttctgcaaaccaattatcaatcttatcgttgttatagcctaccattcctggcagatggaaagtgttcgttgcacagacaaaagcaagattgctattcaatgttttttctgtttttatctgttccgcattacattctataacagctatcgcccccattgtatcagctaaggttaaagtttgtgctgaagcaatcggtaattgatataaacaggagacagcttccgacacatttctacatttctccaacaggtatctgacaatcatacctgcgttaaatcccggtttgcattggttagaatagacggatgttaaaccaacagctaaaccatgttcattaacaccatcttcaatctcaataaaagcagttgtatttcctgtgaaagaataaactccatccgtcaatttataaactacattctgatttagcctttcaatttctgtcagaaaatcactgtttcgtcccagaagaatttcctgttccgttgtaaaagcaaaacaagagcaattacaagatggaggcatagagtacatactaaataatacagcttgcaaaatacggacatcacattgttgtccatctgccagaccttgaatttcttctacaatctcatggtaatacttttcataaatcggaaggcagcacaaagcatagtcaatccgttcctgcgtgatttcaaatggtatgttctctaaaattatatttttgtgttttaacagtaaggaaccccaccgaaaaccagcttcgtagtgtgttcccctaaaatgtgcatgatacatttttacacgctccttattgattagataaagagctaccggtaactcttatctaagggtaactgaataaaaattttaagtcaagccatattttacttgtcggctgggaacagcttgcaacgcaaggtgtccccagatggcaagtccacaaaagggtagctggcggcagccagcgcaggggaagcgtagcgtcccctgtttgatttggagcagaccttgactgcggaaaatcacagccctccggcgaggagccttcggagaacgcaatgcaccaacctctgggtggtgtataattgcgcccttagtaaactaaggggtttccggcttctcccgttccagaagttttttcaatagttcctgcgtgtcctgtctgttaaaaatgagtttcaacaacagcatgacatcatcatctgtcaagcgttccggctcttgcagaaaactttccagcataccgccacgagtacagagccggtgcgtccgttcctttcgggtaagctgctttaactggtgctgcaatgccttttcatcattgatggctttccgcagtttcttttcgcttttctccatctcccggttgagcctttccagctttgaggtatcaggcaagggcagcgtcctcctttcccggtatcagcacataaatcctgtttggttctccaacgccctgacgcacccgcatgataagtcctgcgttttccagttcattcaaagaacgcttgaccgtcataggactgcgggacaggactgcggcaatggctgtgacagggaagcagacaaacaggattccgttctcgtcctcctgcccattggagagcatagcgtccagcatccggcagtacatgacctttgcggtgctgctgactggaaatcctgtcaacgctctgggaaaaggcatacagggcggcaatggtgtgtctatcgtcataaattcaaaattcattctgtgtgttcctcctttttctttgctcgtttggataaataacaggggcagtcaatcacaaccgcccggaagctctgcttgcacccatgctggcatttccggcataattcgttgtaagtgacacgcccccggtcattgaggtaaaaggaaagctcatacttcctctttttgctcattctcggcatattgcgcttcctcccgttttagtgtatggtttcggggcgattttcggtaaaattacagccatagagccgcttaaaatctcccgaagtatcagcgatagggtagactgtccccctatcagattgttgtgtttcggtatcatttcggtgtcagttcgccagttctccccggtgtcgttcctcccctgaatctcacagcggcgtatcgctccctttggtacgctcgttttggtcagggttcctccatatccctgccaaaagtcatgacgctacatcgccggggaagcatatcccacacaggctggtcattcgattggaataatccatcgatgaactacctgtatcatagaacatttttgtgccctgtgccgtatgtccacaaagtaggaattcggggtaaaaatcagaaatttccacgattgcggaattgatatggtataatcaattcaacggttataaatgtcgttagaaagggggaactgcttcaatgaacggagctactacaatacaggaacggctaaaagatttacgattaaacaaaggattaaaactggaagaactggctgagcaaacgggtatttcaaaatcggctcttggcagttatgaaaaagacgactataaggaaatcaatcatggcaaccttatcctgctggcagatttttatggggtgtccctcgattatctcttttgccggacagagaaccgggcggagatcaacacgccattaagggagctgcatttgagtgatgagatggtagcacttctgaaaagcggtcggattaacaaccgtctgctgtgcgaacttgccacccataaggactttatcaagtttcttgcggacattgagatttatgtggatgggattgccaccatgcagattcaaaacctcaacgcccttgtcgataccgtccggcatgaaatcattgaacggtatcgccccggcgaagatgacccccatttgaaagtgttgcaagccgcccatatcagtgatgatgaatatttcagtcacatggtacgggatgacctcaacctgattatccgggatattcgggaagcccataaaaaggacagcgagagtgcacctcagaccaccgttgccgatgaactgaaagaaaatctggaagcggttgaaaatttcaagggcagccgtgatgaaaagctggttgtcctttactgtaagcagcttggtatcaactataaaaatctgtcagatgaagaatttcgctggctgattcggattctcaaaaaatcaaagaaaatgggaacacctatcagccagaggaaaaaacggtaaagaaaaaccgctgttgcatggtttgttagcttccatgtagcagcggtttgtgctgtggttattcagttgatattgtataactcccttttcggaaaagtgttcccgctgttcatttcccaaattttagtgtatattcatacattttttaatttttcgagcaatttgagcaactgtatcttggattttgcctactgaatattgagaaaacttaggctgagaattgaaaaaggctatccctttattgagacagccttttgaatttaattgtaaacgtcaaatcctgcgccttggctaattaatctttttgtgccacactctaaatgacacgaaaaaactattagttttttagaggaggctaaagagcatggaccaattaactcacactgtccgcaggtcgaactggataaacattattcgacagtgccaggacagaccggcaggcactacagcaaagcagtggcttgctgaaaacgatatttctgaaaaatcttactattactggcttcgaaagatccgccgggaagtctgtgaacaggaaggactccaggaagtcaccaccccgtctgccctctcttttgtagaaatcccggtaaaaactgctctggacacaacaccggtgccaaccgtcccggcagcaatgactccggctgcagtgatcagatcaggccgcctgacgctggaattatcaaacgatatttcagagtccctgctttgcaggctgttgcaggaggtgattcatgcttgaagatgctgccggtatccgcagagtcgtgattgcctgcggatatgtggatctgcgcaaagggatcgatgggctgtccatgatcatcggagacagataccatcagaatccttttgaaaagggaactttattcctattctgtggcagacggtccgaccgcatcaagggacttctatggatgggagacggttttcttcagctctacaaacggctggaggcaggttccctgtcctggccgagaaccagcgaagaggccgcagaccttacagaggaacagttccgttatcttatgattgggctgaatcccctgaaccccaaagtcagggaagtaacaccgcaaaagcccacctgatctttgtgcaaaacatagattttttatgcctgttatccagtcagatccattcccggtattacagcctctccggacgctgtttcatggtctgtgacgtatccacaggagaatccggataaaatttcagcaccttgaaaactttatatttccctggctctatgaccatcacaccgccatacaggcataggcagaatgacgaaacctgcgggggctgccggttcgcaatcctttgtgttttctggtataataaaaacagtttaaggagctggacaatggcagacagacatacactggaagaactgaataactgcagccgggaggaactgatcaccatcgttcttatgatgcaggggcagctggataccctgaatgagaacatcgagcggctgatcgaacaggtacgcatagcgaacagccatcgtttcggaaaacacgcagaaacactggattccatagatggtcagctgtccttttttgatgaggcagaaagctgctgtgatctgtctgtcccggagcctgctgcagaggaagtacttccatcccgacgtaaccataagaaaaaagggcaacgggaaatgaatctgaaagattttccggaagaaatacttcctccttatcaggtatccacagaagaactggatacgttttatggtgcaggcaactggcgcagaatgaaggatgaaacctacaaaagactgcgtcatgaaccggaatcctggacggtggaagtccataccgtggaagtctatgtaggcactggcggagatcatcaggatgaattcttacggggaaagcgtcccggggatcttctccggggaagcatcattactccttccctgcttgcctccattctgaatgttaaatatgtgaattcctctgcgctgcacagagtcgagcaggagtttcaacgcaatggtgtaaatatctccagacagaccatgtcgaactggattatccggtgtgctgagaaatacttcgcaccgtttgtggaacgcatgaagcaggagctgctgtccctgccggtgacacagtcggacgaaacacctacacaggtgatcggtgacagtgaccgtccgaacagtaaatgctacatgtgggtacaccgttccggggagttctataaggaacgtcctgtggtgatttacgaataccagaaaggcagggatcacgaaaagccgctggagttttaccgaagctacaagggagttctggtcacggacagtctggagcagtatcatctgctggacaaaaaactgccgggagtgacaaacgcaaactgctgggcacatgcaagaagagcctttgcagatgccgtaaaggcagcggataaaaaagatcccggggcagtaaaaagttccgtggcataccaggcattacaaaagatcgcggaattctaccggattgatactgaactgaaagaacttcctgcaacggatcgccttacacagcggaagacaaggataaagccgctggttgaggatttttttgcgtgggcaaaacaacaggctgcagcatgtgcggtgcctccgaaatccaggaccggacagggactaaatttcgtcatccgtcaggaaaaatatttaaaagtatttctgaccgatggagatattcctatcgataactcggcttccgagcgggctatccggactttctgtatcggcaagaagaactggatgttccataacacagcaaaaggtgccggagccagcgctcttgtttacagtatttcagaaacagcaaagctgaacaatctgcgcccatactactacttcaggcatatcctcacggagctgcctaagtattgtgataaaaaaggaaatatagatccggcaaaactagatcagctgatgccttgggcagaggagcttcccgaggaatgccggaaaccacgccgctcataaaagcggcgttaaatttaagggtaggcgcaggatttgacgtttacgtttaatttaacttatctatcgtttattctctcattcagattcttctctgtattcaaagacgaaccacttttcattcatataaatttctattgtatcgtctgctccatactgataaccaaatccacttccaaaattagactgattatcttctgttggtatttcagttccatcgacagttgatgttatttctccatccatagtgccacaacgtgcatccatgatgctttctctccctgtatcgtagtataatttaccatctattcttaccataggtattctatcccacatggcatttgcttctgtctgttctatcacggtaattttataaacctctcctaattgtgcaggatatgattccattatttctccgttatagctaatttctacgaaatctccaatttgcaattcaaggttctcttcgtttgatatataaaacttatctgctgaatcaagttccaaagaaccatctaccggttttactattattgaatcatgattcgtttcaattaccgatgcctgaaatgttaccattagcggtctattatctgccgaagcaagcatttcagttatacaattacctaaagcaggcgttggtttataaattccttgatatggctgttctacatattcgattcctttatctacatagtaaaaaagagtagttcctgcctccccatcacaatttatattgatcgtaatagaatctttgttgaccggtgcatcattgattgattgctgactggttgtttccatatccattagcatagataaaaattcatcaataaactccgtagcttcaccttctgtgttaggtgatatagcatatttgtcaccgtcagagacaccaatcgatacaatatcctctctggctggcaatctaataggattcccctgttcttttcttccacatgcacataacataattgaaacaaagtagcaaagacaaaccatactgcataatttctttttcatggtcataatcctccccaaaatatatttcgtattatacgttatctaagtgtatatttcaatgtgtgggaaatagccagaacgtgtttttatgcattgtgaatgcatgtttataggctcgttttcagtgggtacacaattccgaaaagggagttgtataaagcgataaactgtaagctatcaatcgccacttaggcgtgttttcccaataacaatgtaaaacaacggtatcattataatcattgctgctatgatatgtacatatatgaaactttgtgttcctgtaacaagaaacaaacttgttattgtataattccataaccaatgaaatcctgtgggcatccaaatactctttgtagtgtaaaacatttcattggcaaatattccatatagaaaaggaaaaataaacattaccagaacagaaatattatcggtattaaaaatatgtggtagtgtaaaaataagtgcagctattacgcaactcaaatacttatttttacatttttgcagcaacagcccaaaaataattcctctaaaaataacttcttcaataaaggacacgaaaaagtaaaatatgaatttccctttatgattcatcaacagtgataaaaaatcagtatcttgaagaattatatttgatttgactgatgaataaactataaacaatacaatgattggcattatagctccaattgcaaaattcagaaaatctatttttctaaaatataaccctatgctttttaacataacgcaccttttaacctctgatttatcataatcctgacaccatactattatgaataaattatctcatgcaaaacaatttcttctgcccgattgtggatattattgcaccgccgcacccattccatttgacgggtacactttaatttctcggttacgccctcggcaattttcatctgctccatgatagtgtctaaccgttcctgtgcctgttcgttcaggtctgcaagatatgtccacaattctccggtcagtatcaatgtgttcaatctggctgggtggacttctcttaaatattcccggtgcatccgtccatactttccgatggggcggcgttcttccggcaacttcaagtctgggatgtagtaatctccaacaaggatataatcaattccgttttccgttattcttggtttcaattcgctcatgttttaatctcctcattctggcttatttttttgcaagtctggctctccagaaatattggtaaatctttggtaaatttgagactgaagcacaaaaaacgcttaaaaacggggcttatgagacgatatgagacttttcatcatgcccggtaaatcctgccgtggcaaataaataagatttttgtcatttttgttcccctatcttcattttgactgtaccgctattctaccatattcccgtttcattttccagtgtaaacagaagccgccgtgcgcgcccacatctccgaaacctacgccgccattatacggtggatttcggagtggtctttccccacaaaaaagcagctgctccttgttaaaaagagcagctgcttttctatgggatttgagtgaaaacttgtaagcaaattaagaatcaagaatattatggataccctgctgaacggtttcatagtctttttttaaagacgccaaccgttcccgcccggcgttttcaatatgatagatcacacgcatacgggaacgccccgtgctcatgcgcgttacgacctcctcgccggtgatgtacccatcatccgccaagcggtacagaagcggataaaaagacccctcctgcactgtaatgaaacctttgcttcgctccttgattttctgcacaagctgataaccatatgcgtcttcttcacacagcaaaaacagcgtgagcatttctatggagccttttttcatggtatcaatagccatagtggagataccccctatcgaataatagtctacagcaaattgaattacaaattaatacctattttcaataaagtgtattaacaagcaaactttcatgcgctatgatgacagcacgcagaacatacgcaatttatactgttttaaagatttatatgtcggcattattgtcttggttgtcaagcggcgcgacttcctcgggcacgtcttctgcttcggcttccacgggcagcaccgcaagcaaatcgagcagaccggtacggtcatattaaccgaaatgttcctaaagaaaaaacgccccgcaaagcacttagcaaaatgagcaaagcgcagatacgccgttttcgcgcgcctgcgctcttattttcgtatttactttctgaaaagcttatccagcgtcttgccatccttacttttccattccgcccaaccgttcgcacttgcaccgaggacgaacatagcggccgagctcggcgacgaaaacgacatcgatttgttcagcacatattcgctgtttacatcggtcacgtctccgtttttcagagctgatcgtctctgacgcgcaatggccggtgaaaggcttttatattccgtgcgcccgatacgcgagccctccagcacctcgaaccgctcgccgtcatacacgccaaacgcttctatgccgttgcgtgttgtatgtaaaaccgtttcttcgctctgcaccgcttttgcatcgttcattttatagcccagcgtcgccatgatgaactgaatttcatcgtagacttcctccacagtggcaaggtcatattcgtcgatctcatatttcggcacaacactgttttccaccgtgtagcgcttggattcctgcgctttaatgatcgcgtatttttcaagcccgctgatcatatccagcgtaaaggtcttgctctccgccaaaaacatgatggctttgttccaaaaatctttcgagcgattgtggtcgtccagccgcaaaatgccgttgcgcgtctgaccgatgtaaatttgcgcgatcctattgtcttcgctctcatttattaaataataaatgccgtgccggttgatgcccgtaatgttcttcgcttcggaaaacagtgggcgtggtatcacatacgtcgtcatggtagataaactgcggcggatggagcgaataccgtccggctgtccgttgtgataaatcgtttcaagctttttgctgatgcccatagtgttttcctctgctcacccatcaaactcaagtttatatatgtattataccacataacatactttcgcgccagtgccaaacgcatattatatgaaacttctgtaaatttcatccccaataaattgccgcacatttttaacgccacaccagccgctgtccgacgggcgcgtatacatcgagattcctgatgtcggcatgaaatctatgatgccaaaaccatgaccgtcctcgcctctgtgccggacggcttcatcgagaacctcaatgcgcagcccatccaaaacaaaaagtaacacagaaaaattaaaaggctctgccgcgcactgatttgatgccgacaaagcctttttctcgttttagggtgttaaatgaatctgaaatacatgcctgcactgccataattgcagtagtgctcgtccgtcgacatgacatcagccttgctgatctctcccgtgatcagtttttcgcacagcactaccatatcctgcacgatctcgagccgcagcgggttatagtagaccgacctgcccgcaaggtaatcctgctggtgctgctcgtcgcagccgttttcctgaatggaatgcccgccgaaccacgcataatcgcgcagcgcctccgcacgcggcaggaagcactcaaggttctttttgtaactctccaagaccttatacatgtctttttccgggcagatcatcaaaacgatatacccggagccgatggcgtcgccggtaaaaagcgccttgtagtgtgcgcacgcgaacaccacggagttttccgtgtgcccgccgagattcagcacatccaccgtcacaccgccgccgaggtcgatcacgctgccctcgtcaataggtacaagctgcgggtatttggcgccgtcggaaagcgccgccgcaaagcagttttcgtcttcgcggatcttctccacatcgtttttgtgcagatatactttttcaaatcggtcgatgcggaacatgtggtcgcggtgcgggtgcgtaatcgcaacctcgaccggcagccgcgtcagcttcttcacggtgtcgagcaggtcgccctcgcccatgcccgtgtcaatcaaaagcgccttgtccctaccctcaatgaggtagcacgtcgccgtaaagtagtcatctatccgccaaaagccgggctttatccacgtcacttcaagctgcgtgcgtctatcctgctttagcagccaacgaacaattcccccgtccgcaaagacattttcccatgcgttttcagggttgatctccgtgcgctccaccgtttcggagcctgttacgcgcaggctcatcacaagcttttccgcgtctgcaagcaccttgccgtctgcgagcacattgccctcacccgcgaacgtatacaccttcagcggcatgaattttgccgcgcgtacttcataggggtctgcgtgcccgccgagaatcgccgccgcgctgaagcaatgcgacaaatgcgaaatcaactgccacgccgcgtccgcgcagctttgcgatgccgtgagcgacaatttacatttgtcgatgatgcccgtcgtctgccattcaaaaaccaagctctgcaccgctgtttcgggcaatataccgcccggtaaaatcaacgcggttacctgtgattctccgcaatgcggctcgagtttacttaaacagctttccgcctccgtctcattcgagacaagacacagcagcgtcggcttcccaccgcccagctccgcgccgttcacgcaccacttgagcacctgtccgtcaaacactttttcaaaataacgcataccttttcctccccgttacaatgacccgctattttgtgaataaaacaaaaagactccacatttctgcaaagtctttcatggtcgaggtgagaggatttgaacctccggcttctacgtcccgaacgtagcgctctaccaagctgagccacacctcgatataagccttgaatactcaaggccatttggcagcggtaccaggatttgaacccagacaaacagagtcagagtctgctgtgctaccattacacaataccgctatctgtttcgctgtctttctttcgtttcgtttgtttccttcggacaacgtagtctattatagcagatatccgggaaaagtcaacccttttttcaaaaaaactttaaaaatttgaaatttatttttcgagtgagaattaaaacacgtaaaaaagcgcggaattatgcggtttttttgccttttcagccgtttacgggctctgccaaaaaacacgcgccgaatgcctgcggcatacgctttgcggcattttccgccaagcttttttcagaaaaaattccaaaaaccgcagagccgctgccggtcatcaacgcatttaacgccccgttttcgcacagatatttttttatctcctgcacaacggagatttgcagcgcgtcgtcaaaccgatttccgagcgcgtttgcaatttcctcaatcgagcgatgctctaccgcgcgcaccatacccggcgtgtagcgcatgccgccgtccggcacgttatcgcacgcacggtacgcttccggcgtgctcacgcccacgtccggcttcacaacgacaaggtaacacttcggtatctttgccagcggcagcaactgctcaccaatgccaaggcagcgatatgtgccgtttaaaatgcagaacggcacatctgcaccgatgcgcaaaccgagatacaaaagctctgccgtattgagcggctcctcccccgcttctgcgcacagatgattcaataatttcagcacggctgctgcatccgcactgccgccgcccatgcccgcctgatccgggatatgcttttcaatataaatatctgcgccgaacggcacaccggtagcgtcaaaataatactgcgcagccttgtatgccgtgttgcgcccgtcgcacgggatgtgcggcttagagcacttgagtataacctcccccgtatcgttcagcgtcacgcgcacacggtcgcagagagacacggactgcatcaccatgtcgaccgtgtggtagccgtcctcgcgccgcccggtaatatcgagcgataagttgatttttgcatacgcattacattcggctgtgttcatattcagtcctccctcataggtcaaacagtgaaaaccgcttgatattgatgacatgcttcgggcacatttcgtggcagcagaagcaatggatgcacttgctgtactcgatgtgcgccttgtgctcccgcaccgttatggtgtgctgcgggcagctttccgcgcacttgccgcagcccacgcactgtgccgtgttgatctttgggtacggcgttaaaattctctttgcaagcggctgcatgaacttcggaacgcgtgtcgtaaaatcgatgctgctggagcgtgcacgcttaaaatcgtatacgacaatattctcaaaatcgtcaccaagcacttcgatctccgaaagctttcccgcacaaagtccgcgctcctgtgcgtttttgagcaccaaaatttcttcgggcttcatatcgatgagcttcgcgccgaccatatccgcttcgtagggactttcagaccccacaagtgcgccgacaaagcgtttttggccgcccgtaggtccatcgccctccatggcgtctatcgcatctataatcgagaaatccgggtgcacatattcgcacaaatcgacgagcatttccgcaaacggctctttttccgggtaacgactatgcagctccggctttaatagccccggcaccacaccgaagagattcttcaccgcgccggaataacccatcatgccatgggtctttaacttcgcaatgtcgatgacgagcgtctcgcgcggccgcgcgaacagctctgtgacggtcagcgtattgcagcgctttccctccggcagctgcactgccgtgctcttacacgctgtatataacgaaaagccgtatttttccgccgcttccgtatagccgcacgcgcggaacgtgcctttcatgatagatgtattgtacggcccgccgccgctttccgccaccagcacgttcgcgctccgccgcagcaggcaaatcgcgaccgcagccgtcacattcgggtgcgtgatgatggcctcttccggcgcagagcgcatgacgaggttcggcttcaaaataacggtcatatgcggttttatgcggccataaaacgccgaagcggtgaacattgcatccaccgcttcggtcagccgttctatgtcataatccgcaagccgctttacatacgcgctcactttaactccttcaaaaatgcgccgatgcggttcagcgcctctgcaaggtgcttgatggaatacgcatacgaaatgcgtacaaagccctcgccgcacgcaccgaatgccgagcccggcaccaccgcgacgtgtttatcgtaaatgagacgctcacaaaattcatcggacgtcatgccggtggactgaatggacgggaacacgtaaaacgcgccctccggctcaaagcaggtaaggccgagacggttgagtccatccacaatcaaacggcggcgcatgtcgtactggtcgcgcatttcggcaatgtcgtcatcgccgtttttcagcgcttcgattgccgcgtactgtgacatcgtcggggcactcataatgccgtactggtgcagcttcgtcatcggggaaataatctccttcggacccgccgcgtagcccatgcgccaacccgtcatcgcatatgtcttcgagaagccgttgatgacgatggtgcgctccttcatgcccggcagcgacgcaatggagacgtgcggctcgccgccgtaagtcagctcactgtaaatctcatcggaaagcacgatgaggtcatggcgaatgataatttcgctcagcgctttcaaatgctcgcggcgcatcacagcacccgtggggttattcggatacgggaaaataagcaccttcgtcttgtccgtaatggcgttttcaagttcttcgggcgtcaagcggaattcgttttccgctttcgttgcgatggaaaccggcacgccgcccgccatacgggtcagcgggtcgtagcacacaaagcacggctccgggatgataacctcatcgccctcgcccacaaggcagcgcagcgccatatcgatagcctcgctgccgccaacggtgacaagaatatcggtagctgcggtgtattccaggtcatatttgcgctttaaaaagcggcagatctcctcgcgcagcgccatcaggccgcggttcggggtgtagcgcgttctgcccttttccagcgtcgtgataccctcctcgcggatatgccacggggtgaaaaaatccggctcgccgatggaaagggagatcacgtcctccatttcatttgcaatgtcaaaaaagcggcggataccggagggcttaatcacgcgcgcacggtcgttcaggtatttgctgtaatcaatcacaaaggttgcttcctctctcgtcaatctcatcgtagtcggtgacaaagtccacgccgccgtccttatatttcgtcagaataaagtgcgtggcagtggaaagcacaccgtcgatcggcgcgaggcgttttgcaacgaacatcgcgatctcagacatggtattcgccgtaacggttacggcaaggtcaaagccgccggacatcaggaagacgctttccacctcggggaaggcctttacgcgtgcggcaagctcatcaaagccagagtccttcttcggcgtaacgcgcagttcaatgagtgcacttgcgcggtgcacatctgtacgctcccagttgatgagcgtgcggtagcccttgatgacgccgtctttttcaaacttatgaatggcggccgccacttcggcttcggtcatatccagcataacggcaagctcctgcacggtcagcttggcatcatcctgcaagagcttcaaaagcttttccattttcttgtccatggtgttttatcccttctgtttttattttgtaggcctgctgtaccttttgcagcaggcagtgtaatctgttttattcgatcggcacctgcaccggcttgcgctctacaaacacggtgtactccttgtagccgatgtcgctcaaaagctccatggcttcctctacgccgcttgcaatgttctccgtgcggtgtgcatccgcgccgatggtgacaagcttaccgccaagctccttatagcgcgaatagacttcgcgatcgggcagcttcggcgcatccgtgcgcaaaatacgggaggtgttgaactccagcgcgatgtccgacttgatgagcgcttttaaaaccgcgtccagctcgtcttgatacggcttgtagctgggcgtttcccccgccttacacatgtagcgcagcgggtaggtgatgtgcgccagtgtatcgaacttgccccactccaccatttcaaggctctccgcaaagtaggcgtgcaaagcgttgtcgatctcctgctcggtgggattatgctcgccgatgtggtaaaaatcgtcgtgatcgcgaatgttgtgcagcgaaccgattaccacgtcgtagtcgcgccccgtaagcgcatcgtgtgctgcgtttaggtcctgcaggggctggccgagctcaatgccgcgcaaaagcttcaaattcgggaaacgttcctgattttgcaacagctccgcataggactgacgtacgacatcgtaataccgtccgccgggaatgtgcggcacgttcatgtactggttgcactcgcagtggtcggtcacggcgtagtaaaccagacccatctcgatggcgttcatgcacatatcgcgcatgttgcgggtgccatcgaacgagcagttggaatggctgtgacaatcggatatatttttgtaacgcaaaagatcatccccttaaagcacttcgacctgtatgctcaaaacaatatacaaattgattttaacacaataaaaatcattttggaatacccaaagcacaagttttgcaacttttcgtctaaaaccgcattgtaaagcgatgtgaaagtttcttccgatttccccacaccgtatctttttgatttttacaccgctatttcccgcaaaacaccttttaaaccttgacagcgccccacatttgatagataataaagaaatagaaaaccacagcaaagcgcttttatgttttgcaggaaagggtagggtcattttatgaaagcagtcatcaccgtaatcggaaaagatatggtcggcattctcgcgaaagtctccaccgtatgcgcagaaaaaggcatcaatgtcattgaagtcacacagtccatcttgcaggatatgttcgccatgatcatgatcgtagacatcagtgctgcgaccgtgccgatcagcgagctctccgatgaattcgatacgcttggcgaaaagctcggcctgaagatccatgttatgcacgaggacgttttcaactccatgcacagaatctaaatctattaccgaaaggccgggaatgaaactatgatcgatacacatgatattctggaaaccataaatatgatcgataacgagaacctcgatgtgcgcaccatcacgatgggcatttcgcttctcgactgcatcgattccgatattgataaggcctgcacgaaggtctacgacaaaatttgcagctatgccgaaaacctcgtcaagaccggcgaggacatcagccgcgagtacggcattccgattgtgaataagcgcatcgccgtcacgcccatcgccatgttggcgggcgcaaaccccggtgcaagccccgttcgctttgcaaaggcactggaccgcgccgcaaagaccgtcggcgtcaacttcatcggcggctattccgcgctcgtgcataagggctttgcccccggcgattacgctttgattgaaagcatcccggaagcacttgcggaaacggaattcgtttgctcctccgtcaatatcggctctacaaaggccggcatcaacatggatgccgtaaagaaaatgggtcacatcgtcaaggaagccgccgtccgctccgcggaccgcgactgcatcggtgcggcaaagctcgtcgtgttctgcaacgcaccggaggacaaccccttcatggcaggcgctttccacggcgccggcgagccggactgcgtcatcaacgtgggcgtttccggcccgggcgttgtgcgcgcagccatcaagaaggcaaaagatactgataacattaccgagatcgcggacatcatcaagaagaccgcattcaaaatcacgcgcatggggcagctcgtcgcgcaggaggcttcccgccgtctgtgcgtgccgttcggtattgtcgacctctccctcgcccccacaccggctatcggtgacagcgtagcagatatccttgagggcatgggccttgcgcagtgcggcgcacacggtaccacagctgcactggctctgctcaacgacgctgtgaaaaaaggcggcgtcatggcgtcctcacacgttggcggtctttccggcgcgttcatcccggtcagtgaagacgccggcatgatcgccgcagcaaagagcggcgcgctttccatcacaaagcttgaagccatgacggcggtctgctccgtcggcctcgatatgatctgcgttccgggcgacatcaccccggagattatttccggcatcatcgcggacgaagctgccatcggcatggtcaactccaagacgaccgccgtgcgcctcattccggccattggcaagaaggtcggcgaagaactgaacttcggcggcctgctcggctgcggccctgttatggaagtcaatacgaattccccggccgtgttcgtcaaccgcggcggccgtatccccgccccgctgcagagcctcaaaaactaaaaaacataaaattcagtttttcgttcatactatcctcggtgagcaaagcattttgtctttgttcgccgaggattttttatcgcctgcgttcgattttcgccatcggtcgagtgcaggcaaatgcaaaaaggagcagagtatatgctggacgtcatcgctttgattttgacggtgatcggcggcatcaactggggactcatcggcattttccagtttgatctcgtcgcatggcttttcggtggacagggcgccgttttgagccgcatcatctacacactcgtcggcatcgccgccgtatggtgcatttccctcctgttcagggacaatgacctcattgaaaagtaaatgcaccgcaaaaagccgagacacttcgttttgaagcgcctcggcttttatttttatatacgtcggttaaaagttctgtctgaaatacgcacatgcgccgagcaggccggcgttattgccgagtgcggcggcctccacctcaaggtcttttgcgaactgctccatcgtgccgttcaagatcttctcgcgaagcgggcggataaaatgttcgtcttcccttgaaataccgccgccgatgagcaccatttccgggttgaaaatgtgcacaagaccgatgattccaaatgcgatgctgtcgatccaactgttcaccgtcgcgctgacgtctgcgtcatcgaggtggtcaaaaatcaccttgccgttgacgccctctgccggtacgcccagcttttcgagcaatgcaacattctctgtaaaacgtcgcacaagcgcgcccgtagaaccgtagcgctcaaagcagccgcggttgccgcacgggcactccacaccgtcaaaattgatgatataatgcccgatttcgccaccgatgccgcgtctgccctgaatgaggcgaccgttttcgatgataccgccgccaatgccggtgccgaccgtaacgacaagcacgttctccttgccctttgcgcgaccaaacgtctgctcgccgagcgccgctgcgttcgcgtcgttgatgacggttacaggcagatgaaaccggtcttccagaattttcttcaccgggctgccgagccagtcgccgagctgtgcacccacgccaataaccgtgccggagttcacatcaatctgccccgttgccgaaacgccgataccctcgattttcacagggctcttttcgagaacttcccccgcaaggttcgcaaccgtcgtcatgatcgacgttttgtagccgtcaaagctgacgctgcgcgtttcggaaagcagaactttgccgtttccgtccacaacgccgatcttcacagccgtgccgccgatatcaatgcctaaaagcgtactcatgaaatggcctcaacaaatctgcgggtgatgtcacgcgggcgtgtgatggccgtaccgataaccgctgcgtgcaccgggtaagagaacaccttctgcagctggccgcgctcccaaacaccgccctccgcgatgaccggcacgttcagctccgtcgtgatgcgggaaagcagatcgtagttcgggataaccgtgcccttcgtctttgccgtgtagccgcacagcgttgtgccgacaaggtcaaagccgatctccgccgcgtgtttgcagtcttcatagcaagagcagtctgccataaagagctgattcgggtactttgcgcgcgcttccttgaacagcgtgtcaagatcaaggccgttcgggcgcggacggtctgttgcgtccagcgcgataatctccacgccggtcgccgccagtgcatcgatctccttcatcgtcggcgtgatatatacatcactgtcgtcatatacgctcttgatgatgccgatgaccggcaggtcaacttcctttttgatgtccacaatatcctcgcaggtattggcacgaatacccacagcaccgccctcttttgcggcaaatgcaaggtggcccataaagtggtagccgtaaagcggctcatccggcagcgcctggcaagagacaattacgccgcggtgaatctggtttaaaatttcctgatttgtcataaaaacgcatcctttcgtttttgaaaacatcctgtatctctatcttagtccgctttgtacgttgccttgagcccaatttcaaacatacggctccacggcaggaaaatatcttccacagttactttgtccgcaacggacgtcatttccgtctttacaaacttgcgcagctcctccaaaacggcgttggccgccttgccgcgctgctcttcgcaccagaagtacgtcatgccccactgcggcagaatgtgctccgtcacgtagctgcgcacgaccgcaccgtagccgaagtcctcaataaaacgctccacaaggaagttctgcttcgcttcggtattattctggtacatattgttcacaatcatcgcgagcaccgtacccatggagtttgcagaggtgttccagcctgcataacctgcaagcttcatcaaaacaccctgcttgttgagcacgcgcagaagctgcaattcgccgccgttcgtgtaggcattgtcgaggatcgccgtcggaatgccgcgcttcaagcaatcgttcacaaagtacagaaactctgccatattgcgctccacatcatagttgatgttgttcgccggctgatttgcggcttcttccatctcgtttgccggagcggtgatgcccatcacaacgtcggcgtcggcgagcgatggcacaacgatgcagcccgccgccatgacgtggtactttacagtctcattgagacttctgtcctcgtagttcgggatcagctgcggcgccagcgtggacgcatacttgaggtatacgcgtggggtgttattctcgagcgcgttgatggcgcgggagacaagcaccatgccgagctcatcggcgcccgggtacaagatcacacggtcattgagcaccttctcgtcgatcttcgcgcgcacggtcttctggtccattgcggtgtagccgtactttgcggaatcgtcctgcgggatgatgagaaaatcaatcgtgccgtcctccacaaggtcgagtgtgcggatattaaagctgccgttaaacgcgcggcggtcaagatagtctttaagcgccgcggggtctaccttggctttcaactcagaaagctcgtccgcgtcacccatgccgagcttttcaaggtgcgtcagacggccgatatggtgaatctctttgccgtaaagctcatagtaatccggctcctcatcgtcggaggaatatttcgggcagcgcatgatgcactggaacgcgtacagctttacctgcgggttcttttcgcgcagttcttttaaaagcatcagacgttccaaaaccgtctcctcggaaagatggtgcaagcgcgagggaatcaagccgccgtacagcagcgtatcgatggaaatgaccgccgcatctgccttttcgatatttgcgagcaggaaatcgcggatgaattcataagacgccggggtcttcttctggccgagatgctccgggcgaatgatcgtatacttttcgccgttgaaaattttggacgggaaatcaaagttgcaggggcgctcgtcgagcggcagcaaaataatacttttcatggtagtctccttttacgcgtggatgatcttccacgcacgtgtgttgatgttctccagcttcacgtccgcaccgccgtcgatgtacaggccgcagtcctccggcacttcaaaatcgaccctgccgggagcgaagtcaaacacattgcccttgagcggcaggttcttagacggcttacgggtgaagtcaatgtttctgagctccacttcgcggatgttgccgtccacgccgtaaatgcccatggcgttctcgcccatgcaggtcacgccgtcaatgtgcacgttgcggatggcgcagtcggtctcgcggtgtgggtcctgctctgccgggataaggtaatcgtgctttacagccatcatgaagatcggctcgccgttaccccaccagttgccggcgcgtacacgcgtgtcaacaatcatgttgctgatgcgcacattctccacaagtgcggacgtatcgttgcacatgaagcagatgccgcggttgctctccttgatgatacagttcgtgatgatcacgttgcggatatggctgtaactgtagccgatgacaattgccttcgagcaggaacgcagcacgcagttcgtgatgacgatgtcctcgcacggttttgcccaatccgtaatgccggaaagcgcaatgcagtcgtcgccgctcgaaatatggcaattggcaataataacacctttacagctcgcaatatggatgccgtcgtcgttcggcacgttgaggctggtgtcaatcgtaaggccaagcagctttacattctcgcacgcgttgaagctgaacgtccagcacggcgcgtcgataaccttaatgccacgcacagcaacattcttcgcattgtggaagaagatgcactggatcgggcgcgtgccgatggggtatgtgcattcggcttcctgctcctttgtgaacggaacacggctgctcggtacgttcatcacgcttgtatcataaaacgatgtgccggaaaggtcaatggtgccgctgccgtcgatagtcacattgtcgtggtcacggttaataagcagggcacgcagcacccccatttcattgtggataaaatcctgtgcagggtagtcgtcgatattcgtggagccctttaaaacagcgcccggctccaaatgcaacgatgcaccattcaaatggattgtaccggtaatgaacacgccgccgggaacgagcacggtctcgcccgtctcccctgcgcggtccacagccgcctgaatggcttttgtgttgacggtcttgccgtcagccaccgcaccgaaatctctgatatttaacattatctctttccccaattctcttcagagttcatattttctgcaccgatatattcggtgtaacagacatcttaaatcaatttcaagtttaaagagtaagaataatgaagcaagggcgcaggaccttttgcgtcctgcgccctgcattcagatcattattcaggtttcagaagagcaattagccttccgtggtgccctttgcgatctcgagtacgttcgggttagcatccagataagccttgaactgggttctgtactcttccatgtacttatcgaggccagcagccttcagcttctcaatagcagcatcgatgttgtcctcataggaaaccataccgaccttaatcgggtagatggaggagatgatctcggtctggaggttcgtcagctcactggtaacgttagaggaatcaaagatgaaacctgcagccggggaaatgacgtagttgtcagacttgtaggtcatgtaatcgacctgctcgtccggcgtatcggtagcataagccatgtacggcaggtagccggtcatccaggtatccatgctgtacagagggttgccgtcgtcgcccttgacctgctcaattctgtggtcgccggtcttggtatagtgcgtgccctcaatgccatagtggaagaggtcatggttctcttcggaagcatacagccagttgaggaacttgaggccggattccggatcctcagaagtggaagaaatcgcattcaggttctgcacataggtgtagatcatgtccggaatgtcgtcgccaaaagcttcaacccacttgacttctgcgccttcaacaccgttcttctgcatcgtaacacccgtgtacgggtcgaatgtctgggacggaagcattgcgccgtaattagcatcgtcgtactgcttctgatggtcgcggttcaagatatccgggtcgatgagaccggcctgatacatctcgtagtaggtgtttgcgtccttcttgaattcttcggactcatagaaggaatcaaccgtgccgtcctgacggatgaggcagatgccgagggagttctcaacatagaacggataggtatcatagcttctgtggagccagtgcgccgtatcctgaacctgatggaaccaagaataagccttcataccggtctcgttgaggatctcgtcctgagacttcttcatgaggtcgatgatgccttccgtcgtgtccgggaactcgtcgtagccgaccttctcagcgatgtcggaacggtagtccatgtaggacatcgtgttgtcgaaggatctccagtagcacggtactgcgtactcttcgcccttgtagagggtgcccagccactcggtctcagagaacttgttgtagaggtccgggtagttctggatggaatcgtggatggaggagatagcacccatacctgcgatagcggaaaggttcttaacgtcctgcataacatgcagcagctcgaactcttcaccggtcgtcagcatgaggttcagcttctcagcataagcatcccacgggattcttgtgacggaaacctcaatgtttacgccgtcttccttcagtttctcgttgacagcagccataccagtctcatagtccgggcaaagtgtgcccggctgtacaatacgcatcgggtgaatggtgccgtcgtcctctgttgccgaagattcgtcagatgtggaagcatcggacgaagtagaagcctcagaggaagcagaagatgtgctgtcagcactggaagtgtcgttgttgccggagcaacctgcaaaagccgtaacgaccattgcagctgccagagccattgccagcagtttcttcgttgtcttcatttcttacttcaactccttgaaaattgatatatgtgtaaccgtcttccacggtaaacaccgaattaaaatgtttgcgggcgattaacccttaacagcgccgacgaccatgcccttaacaaagtacttttgcaagaacggatacagaatgatgatcgggcccatggtgataacggaggtcgccatcttaaagctttccttcggcgggtttacgttgaccgcagcgccggcagagagcttgctcagtgcagtgatctgagactgaatcttgaagaggagcatctgcaaagagtagtacttctcatcattcacgagcataactgcattgaagtagttgttccagtaaccgatggcatagaacagagcgatcgtagccagaaccggcatgcaaagcgggaagtaaatgccgaatgcaatcttcacttcgcccgcgccgtcaatctttgcggattcgttcagctcggccgggataccgcgcacaaagttgcgcacaaggaacatattaaagggattgaacaacaggctcggtacgatgagtgcccagatgttatcgtagcagttcaatgctttacacatcatgtaccacggaacaaggcccgcagagaaaaccatggtgatgtagaagtaaagggacagaccgtctctgtaacggcaggaacggtttgcaagggtgtagcctgcgccgaatgtgatgaacgacgcaacgacggtaccgacaaccgttgcaatcgtcgttaccaggtaggactgcggaacggatgaggacggcaggaagagcattttataggctgcagccgaccattcgctcggccagaaagagtaaccgttgatcgtaatcgatttctcactgctgaaagaaacaatgataacgagaacaaacggcaggacgcatatcagtgcgaacagagcaacgacgagataaatgacgaatgtaccgacgttctcccccgtgctgtgcttgattttgttgttggtgttagacggctttgtcgccgccgcaaccgtgctgttcatgagcttgtctcctttccctgtatcagaacagtgcgccatccgggaactttcttctgacgatccagtttgctgtgaagaccagaatgaagccgacgatggactgatagagaccgatagccatggaaaggctcggatcacctgtgttcttaaatgtacggtaaacgtatgtatcaataacttctgcaatcggcatcaacgagctgttgtcgcggatgatcgcatacagcatgccgaagtcgccgtagaagatgcggccgacagacatcagggtcatgatgcagatggtcggcgcaagcagcgggatcgtgatgtaaatgatacgcttaaagcgcgtagcgccgtcgatataagctgcttcgtaaaggccttcgtcaatgccggtgatcgctgcgaggtaaacgatcgtgttgtagcccgtgttcttccaaatgttgaggatcagaagaatcgggtaccagtagccgggggtagaataataattgatgcgcgtacccatcagattgttgagcaggcccgtctctgtaccaaggataccctgcagcatgtagctgacgataacccaggaaataaagtacgggaaaagcatcatggactgagaaaccttaaggaacttcttcgccttgacctcattgaggacgattgccaaaacaacggagcaaaccgtaccgacgatgaggaacaggatgttgatgacgagcgtgttgcgcgtaacggtccacgcccagctggacttgaagaagtattcgaagtttttcagaccgacaaacgggctaaaaacacccgtcttgtagttgaacttctcaaatgcaattacgatgtacggcagtgtcaaataagaaaagatgaaagtgtaaacgaccgcgggcagcgcaagcaggtacaaaaacttgtttgtccacagctctttaaaaggattcactctcttcttgctgacatcaaccaaagctgacgccttactcatgtttgcgatcatcctctccgaataatgtgtctcttctatataatggaagagttttgttcacctctgcacagccgcacatataaaataaagcttatttgctttatattcatatattgactctgcaaatgcgaacccggaatatctctattcctgctgaaaacaaagtgccgacaaaacttggtgtttgccaaagcgtgtcgttttgcaatcacagcgcaccgggcgccctccctcatgggtcttcccggaacctctgccccgtgcagagataccgtttttgcaaaccgcttgtttgttttcgataaacaaactttaacacgctgtgaacgatttgtaaagtattctttttgcgataaactccaaaatttcaaaacagctttgcattttggcagttttaaggtacttcacaaatttcgcttttctccattttttgagaatcaaatcacttttttcggcttttcgcgatatgaaactacggttttttacgatttgaatcaataatctgatttttcgcttgcgtttagtgccaaaatccgttatcatagagttatacgaaatctaaatcgtgtttttcgttctctttctgtatttggagtgttgtattttgtttaaaaaagtaaaaacccggctgttcaaccggtaccttttcagcattttctgcgtggtggccatagccgttatactcgtcacgcttttaattttcaccatctacgcaaatttgcaggtcagctctgcgcgcacctattctgtgcatcagttggagcaggtctgtcagatgacggacatgctctacagccaagtgcattccgttaataatctaattttgcagaacagcaatacgaaccgttgcctctcctccaataccttcaaccgcctcatcgaagccgacgcaggcatcaagttacgcgagatccaaacggcgcagagctatacgcgctatgttagcctttataactccgcctccaaccgtttcgtctccagctctacggcagattttctcacggatgacgatattgcatactattatcgtagattgcccgataatcccggcgccgatacctgccttctgcgcatgatcggtgcaaactacgccacacagcagctcaagacccgttatgtctattccttcgtcttccgcgtacagctacgcaaaggcggctcgcccgacctcatcatcgtagacgtggacgaagattatttcaacgattccatatcgaacctgcgcacctcgaacggctttcaacaggtcctgcttttgaaccgttacggcgaggttttctccaccaatatcgctgaaggtgattcagaaacctttacgcatgcaaaacccgacaatactattgtctccgtggaggatttcccggagctgaccgacaattccggctctttctcttacacctgtgctgaccataccgaagcgctcgtcacctacgccaaggcgtcttcctccggctttacgatcttcaatattgtgccgtactcgaatatttacagcggtctcccccagctcgccatcatcacgttactcgccggcattcttgtgctctgcgtcggcatgttcatctcgttccgcaccagtgcaaagttctccgcaccaatcgaagtgctctacaacaactacgtcaaaaagccgtcgaacgaccatgccggcgatgagctcgaccagctcagcaaggcgttttccgatatgtacatgaaaaccgataagctggagcaaggcctcatctcctcctattccgattccaaaaagcgcaacattcagcgacttatgcacggcgagtatggacagattccgaattacatcgaagtataccaaagctacggcatcgacctcaccgcgccgtattacaccatcgtcattatcagtgcagcctccaaagagttgcgcttcggcccggatgacccaaactatttcatttacagctacgctctcgaaaacctcgccaccgaagttttggggcagttcggcagtgtcgtaccgtaccgcaattcgcacaactttctcgtgatgttgctccccctgcaaaagaacgcctacccggaaaagcttgtgcctgagcttgagcgcgtgtgcgagatcatgcagcgcgagtttgccatgaacaccaccatctgcatcggcaccatcgtggagacagccgtcaatatcagcctctgctatgaggcgacgaacatcgcactggaatattccgccatccgtaatcagggcaaaattttcttcgcctatgagaccggccagaatatcaatctcaactcataccacaacaagctccacatgaagcttgccgaacacatccgcgcaaatgacctcgatgcctgctcgcatgagttcgatctcgcgctttcctacatgtcaaacgtcagctttaatacagccgttgcgtatttcaatcacgtcatgatgtcgctgctcgacgatttctccaccactttcacggatgacgacaccgcttatcctatcttgatggataaactgaataaaattgaccgtcagctaccgaacgtctatatgctgcgtaagcgctgcatggagttcatcaccattttggcgcatcatcaaagcatcaaccgcaaatacggcaacgagcttgccgccgatgccgcaaaggaatacatcgacaaaaactacgcaaatcctgatctttccctgaaaatgctcgccggcatggcaggcctttcctccgcctacttcggcaaaattctcgccacgcagatcggctattcgttcagtgattacctcagcaacacccgcatgaaaaaggccgagcagcttctgcgtgagactaagctgcccatcaaccaaatcagcgaagccatcggcattgtgaacacgaactacttctattctatcttcaagaaaaagtatggcatgacaccgctcgcctaccgccgcacgcgttccggcgaagcggaagatataaaatccgaagaacaggacgaaaccacagagtaattcacccggtttcacggaccgttcacgaattgttagcagttgattttcataatttttcggaaaatgaattgattttttgtgcatttacgcttataatgtgtatagaacattgaaaggcggcgagcaaatgcgcatccgtaaaaaaccacttggagacaaaaacttagtcggcgcacgtattgagagcattcgccgcaatcgtggcatgaaacagaaagagctgctcgcgcagctgcaggtgcgcggtgttgacatcaacgcctctgccctctctaagttagagggtcagcttcgcaccgtcacggatatcgagcttttagccttcgccgaaattttagacgtcgatgtcttctggctcctcaccggcaaatcccaacagatttaaaaccaaaaccgggtagcacaccgcacggcagcttacccggttttcttttagctttttatcgtttgtttatttctttcctctgcaccgcaaaatgcgccctatacaaaaactcccggagagcacacggctttccgggaatttcattctgtaatagaaacgcttgcttaaaagcagctcgggtcagattacttcttgcttttctcgcccttatgcacagcccacatggtgtacagcggagccgcaatgcacagcgaggaatagcaaccgacaatcgtgccgaccatcatcggcagtgcaaagctctgtacagagctgatgccgtaaaccgccgcaacaatgtagatgacaagcagcgccatgaaggtggtcagagatgtcagaatagaacgcgtcattgtctgattgagactcttgttgacgatagccggcagtgcatccgggctcttcgtcggggagagcttgcggttttcacgaatacggtcgtaaatgacgatggtatcgttcagcgagtagccaaggattgtcaggataacagcgatgaaaatatcgttgatcgagaaaccgaaaatcacaaacgcgaaatacacaagcagcacgtcatgcacaagtgcgatgagcgccgtaacgccggcggaaagaccgccgattttcttaaagcgcagcgcaatgtaaacgagcaggatcacgaacgtgatgagcaagcaaacaaggcacttctggaagaacttcgcacccatggtcgggtcaacggagctcgattccaccacgttgaacgtgcggtcggcatacgcgtcggatagggactgcgcgattgcctgctgttcatcgagcgtcacagcttcgttgcccgcaaaggacagcgtcacttggttcgcgtccgtgccgaacgtcttactcaatgcaacggaaacgtcgcggccggtctcttcttttacgagggacgcgatttcatccgtatcgacttcgccgtctacggaatacttaatcatcgcaccgccgacgaactgaatgtccatcttcgtgccacgaatgaaattgaaaatcaagccgatgaccatcaggccaatcgagatgccgaacagaatttttctgttcttatagaaatcaaaatcaaactttttcattacttatccgcacctccaaacagccatttcttacggagcggcttgaagccggaaagcgatttgatcatcaggcgagagcagaacacgcccatgatgaagttaccgattacgccgacgagcaaagtgtagccgaaggagtagatcgcaccggtcgtggattcgccgaaaatcttagagagaatgttagacggaccgaacacgccgatgagcatgatggcaacgatcaaaatcgtgatgttgccgtcgatgatcgaccaaaggctgttggagcagcccttctgaatggcgccgtccagcgttttgccggtaccgagttcttccttaatacggctcgcggtgataatattcgcatccacgcccacgccgatggaaaggataatacccgcaagacccggcagagtcattgtaaagctgttcacaaacgggaagtagccggaaatcgccgcaaaggtgattgcaagctgacccacaagcgtcagcacagccgcaaagcccggaatcttaaagatgatgatcataaagaccgcgatgagcgcaaaagcgattacgccggccatgaccatggcatccagagacttcatgccgagcgtcgggttcacggtgctgaagttcgaggtctgcaaagcaaacggcagcgcgccgccctgaatctttgcggcaagctcggaagccgtagctgccgtaaagttaccggtaatagaagccttgccgtctgtgataaccgcgttaacggtcgggtaagaaatcataatgtcatccatccagatggagattgtcttgcccttcaggcgttcggtcgcttccgcaaacttctttgcgccctcatcggaaagcgtcagggaaatcgcataatcatagctgccggaggtggaattctcctgcatgaccggctttgcctccgttacatcgctgccttccagaatgatgttttccgccgttgtacccgtcggtgtctggtaaaccgggttgccctcgccgtctaccgtctgagtctcgtaggacttaccttcgcggaatgtcagcagcgccgttgcggaaatttcttcaatcgccttctccgggtcaaagtccgattcgccgctcttccacgggaaacgaacaatgatcttgtcgttggcttcgtcggtgtaaatctcgtagtccgtaatgctcttcgagaccatacgcagctcaatgattgcctttgcggcttcaagctgttctgcggtcgcctccacgccgtcagccgggctgaaggtcgcttccacgccgccgcggatatcaataccccatcttatatcgccggcgcccttgatccatgtgttcttcgtgtcaccgttctgcgtgtaaacgccgaagaccgatgtgtatgtaagcgcaaggatcagagccgcgatgataaaaaacacaggttttttcacgcgcttcatctaattgtttcctccaatggataaaaccgccgttttatccgtttacttttaaaatgtccgtcatgtaaagcagggtggaaagaaccaccctgcaaatttacacctgacgatttaaattattcctcagaagcgtcctcgccctggtcttcgagcagagcacggatggagagggaaactctcttcttgtcgaaatcgatgtcggtaatcttcaccttaacaacgtcgccaaccttcagaacgtcctgcggcttctcgattcttctgtccgcgatctgagagatgtggatgagaccgtcgatgcccggaagaatcttagcaaatgcgccgaacgtggtcatgccgacaacggtagcgtcgcaaaccgtgccaaccggatactcgttcttgagaatctcccacggattgtcttccttcttcttgtagccaagggagatcttgccgttctcacggtcaaggctcttgacataaacctgaacggtgtcgccgacggagacaacttcgctcgggtgcttgatgcggttccaggagagctcggaaatgtggatcatgccgtccacgccgccaaggtcaacgaatgcaccgaagttcgtgagggacttaacggtacccgtaaactcctgaccttcttcaacagactcccagaacttagcctgtgctgcctttctctgctcacggagcacggaacggatggaaccgaccgcacggcggcgctgacggttgacctcgatgatgcggaactgaacgtcctgacccttcagagcctcaagatcgtcaccgcggtttgcaacagcctgagaagccgggatgaagacgcggatgccgttatacagaacaatcacgccgcccttaacaacttctgtgaccttgccggtgaggatttcttcagcgtccatagccgctgcgatgtcttcccagcccttgatggcatcgatgcgcttcttggagagcatgatggtgccttcctggtcgttcgtcttcatgatgagcagatccatctcgtcgccgatctttacaagatcttccggcttcgcgttcggatcgttgctaagctcgttagccgggatgtagccggcctgctttctaccgacgtcaacatacacttcggtgggagaaatgcttacaactacaccgtgcaccttttcgtctgtatttaagctcttgagtgattcctcaagcatctcctcaaaattaagctcatttgtttcaattttgtctgtcatggtaacaagtacctcctttattatgcttgccggtgttgaagcaccggcagttatgccgatattcattttgccctttacaggcagggctgcaagctccgccgccgtctcaatgagatacgtctgcgcatacggttcacagacctccttgagcttcgccgtattcgagctgtgacgcccgccgatgacgagcatcaagtcgctttcacgcgcaagctcgcgtgcttcgcgctggcgatttgttgtagccttacatattgtatcaaaaactgaagcgtttgtacataccttttttacgaaatccaaacatttttcccattcttctacgttaaaagtggtctgttcacaaaaaagaaggggcatttcggcaagttcaggctcatttttgaatagattttcgagttcttcgcgcgttttgaaggtgcggtacggcgttttgcagcagccgagtatgccctccacctccgggtgttttgcatcgccggccagcatcacgcgcctgccctcgcgctctccgtcggaaacaaggcggtgaatcttctgcacatacgggcacgtcgcgtccttgtaatcgacaccgagcgctttcagtttttcgatgacctcgggcggtacaccgtgcgagcggatgacaaccgtttcccccgctttcgcgtcctcgggcgcatctataatgcgcacgcctttgcggccgagctcctccacaagctgcgggttatggatgatcggcccgagcgtgcagacggttttgtcctcgtcaagcaatttgtaaacggtctccactgcgcggttcacaccaaagcagaatcccgctgttttcgccacgcggatcatacttccttccacctgttctccataatatcgagaccttcctcgcgcagcttctgcacctcggcaaaaatattgcgcgaaacacggcggtaaatcataccggaatcttcggtcaggcccatgtcctcaaaccggattggcttgccgatgttgatgaccattttcttaaacaccttcgggggcttgccgccctcacccacgatcgccacaggcaaaatcgtacagtgcgtcttgtacgccagcattaccatacccattttcgggttcaaaagctcgccggtcttcgagcgcgtaccctccgggaacatgcacacgaccttttcttcctccaaaaggtcaatcgccgtctgaatgccctgtgccccgcccgtgccgcgggagattgggaacgcgccgaggctcttcaaaaatccgccgatgagcttgttttcaaaaagctcggccttcgccatatagtgtaattgtcgtttcggtattgcgcagccaaggtaaatcgggtcgcccatcgtcacgtggttagagcaaacgagcagcttgccggtaagcggcatgttctctctgcctataatacggtacgggtgcagaattttaaagaaaaacagcatcacgtactttgcaaggaaataccaccaggaaaggtgttccttcggcttcttattttcagccatgcttcacgcccgtcctttcttccacgatctccagtaagcggttcaccgtaccgttaaaatccagctcgctgttgtcaagcaaaatgctgtcctccgctgccttagattgcttttcgtcctgcttatcgcggcgaataacgtccgcaagcgtttcttcatagctcacgtccacgcctttttccttgagctccttgtagcggcgctcggcgcgcacctcgggcgaagccgtcaggaaaatcttcacctgtgcgttcggcaaaatcgtcgtgccgatgtctcggccgtccatgatgacgttgtactttttcgccatatccacctgcgcggagaacagaaacttacgcaccgccggtacggaagcacacgcagaggccgccatagagacctccggcgtgcggataaggccggatacatcctccccgtttaaaatgacgtgctgcacgccgtcttcgtatttcagatcgacctgaatatcccggagcttcggctccaccgcttctgcgtctgcagggtcaacctcactgcgcagcaggtaaagccccaccgtgcggtacagcgcgcccgtgtccacataaacaaagccgagcgcctttgcagccgctttcgccacgctgcttttacctgcgccggcaggtccgtcaatcgctattgcatacataatataacttccttatatataatgatagtttacagattctcgcccgccgcgtgtcccgttgcaaaggcgatctgcaggttaaagccgcccgtgtacgcgtccacgtccagaatttcccccgcaaagtacaagcccggaattaatttggactgcatcgtcttcgggtcgacttcctttacggaaacgccgcccgccgtcacaatcgcgccggaaagcggtgcaaagccggaaatctccaccgtaaagtgctttaagacatccaaaagcaccgcacgctgctcgcgcgtgatggtgttgcacttctcttccggcggaatgcctgaccgccgcacgacaaccgggatcatcttttgcggcaataattcatcgagcgaattgctgaaattgcggttcttgtttttctctaaatcgcgtaaaaggcgctggtcaagctgttccggggtgagcgccggctttaagtcgagcgtcactgtgtatctgccgggcgccatatgacgcatgtgcgcgctcgcactcaaaatcgtcgggccggaaagcccaaagtgcgtgaacagcagctcaccgaagtccgtgtaaaccggcttctttttcttttcattgtccgtcacggtcacgccgcagttgcgcagagaaagcccctgcatcgccgggcaatcctcgtcatcagaggtcagcgccaccaaagacggacgcataggaataatggtgtgccccagcttttccgccagccgcgcgccgtcgccgttcgagcccgtgccggggtacgaagcgccgccgcacgccaaaagcacactgggggcctcaaacacatcgttttccgtgcgcacgccgatgacgctgccgttttcggtcagcacctctttcacattgccctgccgaatttccacgcggcactttttcagcttcttccaaagcgcgtccgcaatgtcgtgtgcattgtccgagaccgggaacacgcggttgccgcgctccgttttcagcggcacgccgagcccctcaaaaaagtccatcgtgtcctgcggggtgaaatggttcaccgccccgtacaaaaaccggccgttgccgggcgtggattcaatcaccgtgcgcggctcgcagttgttcgttacgttgcagcggcccttgcccgtaatacggatcttccgcccaagctgtgcgttcttttctaataataagacgtgcttgccgcgctccgccgccgtgatcgccgccatcatgcccgcagcgccgccgccgactacgactgcatcaaacattacgttcctcgtcggtcttgtcttcgaccttctcgtacacgccgtactcgtcccaaatggtctccaggtttaagagtgtattcgccacttcgtctttctttttaatagccaccgtcacaatgagcgcgttgataagcgccatcgggcccacaagcgaatcgacaaatgataccatgtcgctctttgcaagcagcacatgctccgcatacttcgtcagcggagaaagcgtgctgtccgtaatggccacaaccgtcgcaccgcggtcggaagcgtatttcagcgccttcactgcttttttggagtaccgcgggaagctgatgccgacaagcgcgtctccctcgccgatgtgcaccatctgttgtagaatctgcgcttcgctcgtcgcgctgataagctgcacggaatcgaacaccaaggagaagtagtacgagaggaacgtcgcaatggcaagcgagctgcctgcaccgatgatataaaccttctttaccttcacgagtgcatcggccgcacggtaaaattcctcatgtgaaatagactccttcgtgcggcggataatgtcgatgtcctgatccatcgagctgtcaagcaggcggtcaagcggaatgttcgtcgaggtcatttcaaggcgttgcacgctcgtcatgcggttgcggatcatctcctgcatcgcctgctgaagcgccggatagccggagtatccgatctccgtcgcaaagcgcaccacggtcgattcgctcacaccgaccgtcgcgccaagcttcgaggccgtcataaacgccaccttgtcgtagtgctcctcaatatacttcgcgatcaacctctgacctttggaaaacgatctcgcattttgcttaatgcgattcgtaagctggatattcatgggtgatttcctttctttacgtttcctgacaggaaattttacagcacgagtcgccgcttcctgcaaaatttcctccgtgcaaacgcggccgcatacctgtccctatggacagggcgcacgtatacacggtatcataatgtttattttagccgatattcctgcaaaaatcaagggatattttcgctgttttctatgaatttcaaaccgtttttgcaggaaacgtatcctttcatgcaaaggtatgtccgtgcggcacggatatctctctccattctttgccatcctttacaaaagaagcttgcaattcctttcgttttgttgtatccttattccgattattaaccgtttaattctgttgatttcccacaacagaataaacgcacccgtcttttggaggtcttttatggaaagtaaaacgctcatttcgtccattcgtgaaaatatcggcaaggtcatggtcggttccgaagaaaccatcgacctcttgctcaccacgctcattgccgagggtcacgtgctcatcgaagatgtgcccggcatgggcaagaccgtgctcgcaaagtcacttgcaaagtccgtcagtctggagtttaaccgcatccagttcacgcccgacctgcttcccagcgacgttacgggcctcaactacttcgaccagaaagcaaacgatttcgttttcagccccggcccggcattctgcaacctactcctcgccgatgagatcaaccgcgccacaccgcgcacgcagtcgagcctgctcgagtgcatgggcgagcgccagatcaccgtggacggcatcacccgcccgctttcggcgccgttttttgtcatcgccacgcagaatcccatcgaaacgctcggcacctatcccctgccggaagcccagctcgaccgttttttaatgcgcatttccatggcctctcccacaaaagagcaggagcgcgccatcttgcagcgctttatgaaggaagagccgctcgaaacgctgcaaagcgtctgcacgcgtgaggatattctcgcgctgcaaaagcaggcaaaggagatttacattcaccccgtcctgctcgattacatgatcgatctcgtgcaggccacgcgcagttggccgaatatcgatatgggcgtcagcccgcgcggcagccttgcgctcgtccgtgccgtgcgcgcttacgccttggtgcgcggcggcgcatacgtcgtgccggaagacatcaagaccgtcgccgtgccggtgctcgcccaccgtttgcagctcagcggctccgtcggctccaccgatgcccagaaaaaggccatgaccgatgtgctctcctccgtcgccctgccgactgaggactggtcaaagtaatgtgggcgctccttctgctcccggtcgttttgctcgtcctctatttttcacagcgccttttgttccgccgcctgtggaacgaaaacctcaccgtacagatattctttgaccgcgattacattttctgcggcgaggaagcgaatctcgtcgaaacgatcgtgaacaacaaatacctgccgctccccgttttggaggtcggcttcgatatgagccgctgggtggtgtttcaggacgaagaaaactccaccgtcagcgatatgacctaccgccgcgacgtgttcacagcgtccgtgcgccagcgcatcacgcgtacactacctgtccgcggcaaaaagcgcggctattaccgcatcgcgtccaccacggtcacgtcctacgattttctgatgaccgaaaagcagatggcgcatttcccgcaggaaacggagttctacgtcctgcccgcgcacatttccgcaagccacattcgcattccgtacagcaagatcacgggtctgctcgtcagccgtcgacgtgtgtacgacgacccgttcgagtttgccggtatccgcgattaccgccgcagcgaccccatgaaatacatcaactggaaggcctccgcgcgcggcggcacgttactcgtcaatcagcacgattccacgctgtcccaaaaggtcactgtcctgctcgactgcaccggcatcggcagcgccgtgacggatgcgttaaacgagaccgccatctccatcgccgccgaactcgcggaacgcatgctcgcagacggcatctcggtctccgtcatttcaaacggcatagataccgtagacggcaaaatgctctccaccggcgagctcaccagccgcaacaccgcactttacctgcgccgccggctcgcaagattggaatgccgcaacgacctcacccccatgccgcagcttctccgcaccctgcacgacggcgcacacggcagcgacctctacgtgctcatctccaaggagcaaaagctgcccgttctgccggatttggaagccttaacggagggcagtgacgccatctggatcctgccggaagaccgcaacatgccggagcgctacaaactcacggagacctcaaaatccgtcgaaatcgtccgctgggaagtttaacgggaggggacaaaatgaaaattttcaaaaagcaaattcccgtccgccacattttatacgtcgtgctcggctggctgcacgccaccatgctgtgtgtgccgctttacgcgctcgttttaaattttgtctcggagggcatgataaaagacgtcatcctgcaaaacatcctgcggggatttttgattctcgctcccatcgcactcagctggttcgcaataaaatgcctgcgccgcatctttttctatattctcgcaagcatcggcatcacggtactcaccggcttcctgttcgattccgtcctcatggccgtcgtcgcgctgttcatctgcttcatgcggctttacggccgcctgcacggcgaaagccactctctatttgaccacgccggctatgcgggtcttgccgtgttcgccgtgccgttcctgtgctctgtcttcaccgaccgcgccgatttgattttccagcccgtctccctcgttttcgcggccgtttacttcgtgctgtgcctcacgcagcgcggcatccgccgtatcgatgattacatcgacgtcaacgccgccatgcagaacatgcccgtacgccgcatcgtgcgcatcacctgtgcgcttttggccgccgcagccgtgttctgtaccgccgttttgctgccgccgctgctcacaaacgacatcggctaccgctacaccccgcgcgaggcggtccacgccgaatacaccccgcccgagcagaccgaaacatcctccggcggcaatatgccgcttgacgagatgatacccgccgcagagcctagccccgtgctcgtcctcatcatgaaaattctcgagtacatcgtgctcatcgcgctcgcgggcggcctcatcttcggcgttatttacggctgcatccgcatctcgcgcgggtttaaaacctcgtttgtcgatcggcgcgaccttgtggaaaacctgcccgaggacgaacgcaccaccgtgcgggaacgcgcccaaaagcgcgaccgtcccggcttccttgaccgctccccgaccgctgcggtgcgccgcaaataccgcaaaacgctgctgcacgccgcaaaagagccgcccgcgcgttggatgtcccccgccgaagcggaagcccacgcgaagctccaaaacgatgccctgcacatcgtctacgaaaaagcccggtacagcgaaaaaggctgtacaaaagacgacctcaccgcaatataagctgtacaaagcgaacagcccatggcacacggaaaaccgcagccatgggctgttttattttatatatttctgtacaagcgggtgcagtctgcgaatgtacaggacgatcagtccgttcatcgagtaatcgtacagtacaaacaccacattcagcatcaccgccaaaatcgggacagaccatttgccgaacacttccatttcggaaagcgggatctgcaaaacccaaaccgccagcgccgtttccagcgccatcgccagattaaacacgccgaatttcgcaagcacacgcaaaggcttacgcttaatgcgcatcaaaagtccgtacagcgtcgggtagtaaccgaaaaataaaatgtaaaacaaaatcgcttctctgtccggtgtcagcaaaatcgccagcacgctcacaacgcaatacaccgcaaagccgtagcgcacatttgtctccgccacaatggcaatcgtcaaacagcccgccaatgcaggcagtgcaatcgtcgcaacgggtacaatgccggtcatcagcatcagcaccacggaaagtgcagaaaccacaccgcacagcgcgaccttcgccgctttagagcgcatgaaaacgcccccttagcagcaggggatcaggtcgccgcccatgcactcgcaacagcagtccgcgcaaatcagaccgttgcagatgtcacaggcgttgcacccacccgcattgttcatgttcatattcggattgtagccgccgtaaacgccgctgcgctggttcatggcctggttcagcgccgcctgatactccgggttgcccgggtccatctggcacgcgcgcgtgaagtgctccttcgcttcctccagccagccgcggcggtataaaaccgtaccttttaagaaataccactcggcgttacggctttccaccggcacgccgtttaagatctgctccgcgtctgcaatgcgccccgccataatgaaacggcgtacatcgttaaagccggaagcactgctgccacccgcatacccggcgttataacccgcattgtacgtgttatagttgttgtagccgtaaccgttattgttcgcaccgcggtttttgcgttgcgaaacaatggtgtcgtacgcctcattgatctctttcatcttctcgcccgcaagctcggagagcgggctgtcgccgtattgatccgggtggtacttttttgcaagctttctgtatgcgtctttaatttcttcatccgtcgccgagggcgacaccccgaggaccttatacggatcagtcatgtcgtttctccttctttatatgcaggaaaaggatctccctttgcatttccgggagccctttttcaaaaatattctccaaaattcgggtaaatttgccgctcggcaataggttcaccgccggcagcagccgtgcaagcgagccgtttaataccgcattgcactcttcgtcggcccttttgcgttcttcgggcaataaatgtaacccgcgcgagctttccagtcccagcttttgaataaacgggttgaatttctgctgtaaaaggtcatccgtaaggtcgtccgctgcatccataatgtagatccagcgcccgaggaaataccccacctcgctcaaaacggccttttcgcccgcattgctgccaagctccgcgcagatcgtctgcagcatctccgccgtcggcgcactgcatcggtcaatggaaatttccttcgcgtgttcggcgtcggcctggtcgtccatcattttctgcacggcatccgccataaacggataatcattgctcgcctttttcatcgcgcgtcgcgcaaataagcgcaaaacgcatgcgccgaacgctttcagcccgtcttcatccgcggcggtatcgcgcaacttgtgcaccgccataatgatgctcagtgccgccgccttgtggaacgcctcttcggcaaacacatcctcgttcgcggggcacacatacgtgcactttttcatcgggttgcagcagcatcgctttttctccgcctttacatcggcatcgcgctgatttagtgccagcatcgcatacagcgtgcagtcgtagctcagcgtcagccgcatcggaaaaccgtaatattttccgagcgcccggcaaagctgacagtaaacgcctttatatgcgtcgtattctttcacgagcatctcgcccttgaacggacgcacatagccaaacataccgcaaacctctcctttccgttcttcattctacccgatttacacgcaaatgtgttgaacaaaatgtaaatatgaaccgcccgcaccctgaaagacgcaaaatttccggctttatatcttggacagattctttttccgtgtcaatccgtttaaagccgcaaaaacgccgcgcacccgaaaaccgggcccgcagcgtcatacgtcactttgaatttgtcaggctttctgctccgccctgcgctttttgtcacgctccagcatcattttgatatactcgccggtgtaggaacccttcgttgccgccacttgctccggtgtgccctccgcgatgatcacgccgcccttgtcgccgccctctgggccgaggtcgatgatatggtcggccgtcttgatgaggtcgagattgtgctcgatgacgatgaccgtgttgccgccgtccacgagcttttgtaaaacctccacaagcttgtgcacgtccgcaatgtgcagaccggtcgtcggctcgtcgagaatatacaccgtcttgccggtcgggcgtcggctcagctccgttgcaagcttcacgcgctgcgcctcgccgcccgaaagcgtcgttgccggctgaccgatcttaatgtaccccagtcccacgtcgcacagcgtgcgcagcttgcgcgcgattttcgggtggtccttgaagaacgcaaggccctcctccaccgtcatttccagcacgtcgtaaatgcttttgcctttgtatttcacttccagcgtctcacggttgtagcgcttgcccttgcatacatcgcacgcaacgtaaacgtcgggcaaaaagtgcatctcgattttaataatgccatcgccctggcacgcctcgcagcggccgcccttaatgttgaacgaaaagcgcccggaggtaaagccgtgcattttcgcttccggtgtgctggcgtacagctcgcggatatccgtaaacacgcccgtatacgtcgccgggtttgagcgcggtgtacggccgatcggtgactggttgatctgaatgaccttgtcgaggttctccatgccgcgaatttccttatgcttgcccggcaccgtgcgcgcgccgttcagctcgccagccaaacgtttatacagcacctcgttgatgagcgacgatttgcccgagcccgaaacacccgtgatgcatacgagcttgccgagcggaatgtccaccgtcacgtttttcaggttgttctgctgcgcgccgacaatggtgatttttttgccgtttccttcgcgtctggtctgcggcacggggatgaaccgctgcccgctcaaatactggccggtgatggactccgggtacttcaaaataccctgcacgtcgccgctgtaaatcacgttgccgccgtgaatgcccgcgccgggaccgatgtccacaatgtagtcggccgcaagcatcgtgtcctcgtcgtgctccacgacaatgaccgtattgccaaggtcgcgcagacgcatcaaagtcgataacagcttgtggttgtcgcgctggtgcaggccgatgctcggctcatcgaggatatacaaaacgcccatgagagacgagccgatgttcgtcgccaagcgaatacgctggctttcaccgccggaaagcgtcgccgccgcacgggaaagcgtcagatattcgagacccacgttgcgcaaaaagccgagacgtgaacgaatttccttcaaaaccgccgccgcgatcatctcttcgcgcggggtcagcgtcaacgtatcgaggaacgccagcgcgtctacaacggaaaggtcgcaaaagtcactgatattcttaccgcccaccgtcacggcaagactctctttggaaagacgcttgccgccgcatgcgtcgcacggcaccgcactcatgtacgactcgatttcctccttgatccacgaggaggacgtgtcgcggaaacggcgctcaaggttgttgatgatgccctcaaactctgtctcatacgtgccgcggccgtactcgcttttgcggtgcaccttaatcttctcgcccttcgtgccgtaaagtaaaatgtctacaagctccggtgagaggtcgcggatcggcgtatcaagcgaaaaatggtagtgctctgcgagcgcttccatgtacatcgtcgcaatggtgctgccctccatcgcccaaccgctgcccttcaaaccgcccttacgaatcgataagcggtcgtccgggatgatgagtgccggatcaatgcgcatgaaaacgccgagtcccgtgcacttcgggcacgcgcccgcagggttattgaacgagaacatgcgcggcgaaagttcctccatgctgacgccgtgctccgggcaagcgtagttttgagagaacagcgtgtcctcgccgtccaccacgtttacgataacaagcccgccggaaagtcctgtcgccgtctctacggaatccgccaagcgcgagcgaatgtccggcttgatgacaagacggtcgacgacaatttcaatgttgtgcttcttattcttctcaagcttgatgctctcggaaaggtcataaatgatgccgtcagcacgcacacggacaaagccgcccttgcgcgccgcctcaaactccttttggtgctcgcctttcctgccgcgcaccaccggcgccaaaacctgaattttcgtgcgctccggcatctccatcacccggtcgacaatctggtcgacggtctgctggcggatctctctgccgcagaccgggcagtgcggcacaccgatgcgcgcgtacaaaagacgcagataatcgtaaatttccgtcaccgtgcctaccgtggaacgcgggtttttggaggttgttttctggtcgatggaaatggccggcgaaaggccgtcaatgttatcgacatccggcttttccatctgcccgaggaacatacgggcatagcttgaaagcgactctacataacggcgctggccctcggcgtagatggtatcaaacgccaaagaggacttgccggagccggaaagtcccgtcagcacgaccagtcgatcacgcggcagctttacattgatattttttaagttgtgttctcttgcaccggtcacggtgatgtactttgaactcatttcggtttaccctttcgtttcttccttcttaaagcttgatatttccacccacgcggggtaaaagcccgtgttgagggcgatattctgcgaatgtaaattggcgagcactgtgccgtaaaacggcgttttgccgagcgcttcgatgcgatcacacagcagacttacaagtgttgtgccgagtccatgtccgcggtaccgttcttttacgtcgatgccaacctgccacagtgcgtccgtgtctgccgaagcacctgccaacgtcgcgatctcgtcgccgtcatacgccgcgagtgcgaggacgtccgggcggtcggggttttctttttcacttaacgcattcggaaaatccgtgttcgggtacaacgttttcacgctcgttttgtcaaaccatttaagtgtaaaggtgaacggcattacacgcgctttgtgcggcttgccgggcaaaaacatgtggaaggtcgacgacaatgtgtagtcgtatttgttcagctcacgttcgatgcacagcaagtgcggaagctcgaacaacaaatacgggtgcttgaagcgctcggtatcgcccgtaaactcctttaaaaacgggtgcaaaacctcgttcgccgtgataaccacgccactgccggtggatgccatttggaagaacggcagctcatgcgaatagagccgcacgccatcgggcttcgccggcgttgtgacagtcacttggtttgctgtaaagtcttctggctttgcattgtattccagtgccaattgacgcattgtctccgtaaagcatttcgccttgtcaatcatgtcgaaaactcctatttttccagttccttgatgcggtcacgcaggtaggctgcatgctcaaactcaagcagctttgctgccgccttcatctcctttgtgagcttgtcgatcatcacgcgcttttcagcggccgtatacttcttctttttcttcgatttaccgcccgcttcctccgcctttgtggaaatctccaaaatctcggagacctttttcacgatggtctgcggcacgatgccgtgttcttcgttgtatttttcctgaatggcgcggcggcgctccgtctcgcgtatcgcatattccatcgacggcgtgacgaaatcggcatacataatgacctcgccatgtgcatttctcgcagcgcgaccaatggtctggatgaggctgcgtccgctgcgcaggaatccctctttatctgcgtccagaattgcgacgagcgacacctccgggatatcaaggccctctctcaacaggttgatgccgacaagcacgtcaaactcgccgagacgcagatcacggatgatttccatgcgctccaccgtatcgatgtcgtggtgcatgtagcgcacgcggatgctgtaattttcaaggaagcccgtaagatcctccgccatttttttcgtgagcgttgtcacgagaatacgctcgccgcgcgcggtacgcatgttgatctccgaaataagatcgtcaatctgcccgtcggtcggctttaccgtgatgcgcgggtctaaaagtcccgtcgggcgaatgacctgctccacgaccgctgcggatttttccagctccaagtcgcccggcgtggcgctgacgaacaccgcctgattgacgtgcgcatagaactcatcaaaattcaacgggcggttgtcatacgccgagggcaaacggaagccgtaatccacaaggctctgtttacgcgcgcggtctccggcgtacatggagcgcacctgcggcaacgtcacgtgcgattcatcgacgaacagcagaaaatcgtccgggaaataatcgagcagtgtgcacggctggctgccgggcttacggcccgaaagcacgcgcgaatagttttcgatgcccttgcacatgccgatctcgctgagcatttcaatatcatagcgcgtgcgctgctcgatgcgctgcgcttcaatgagcttatcttcggacttaaagaacttgacgcgttcttccatttcggcctcaatctccttgagcgcgaccgccattttttcgcgcgggacgatgtaatgcgacgccgggtagatggcgacatgctttaaatcgctgataatctcgcccgtgagcggcacaacctcgctgatgcgttcgatctcatcgccgaaaaattcgacgcggatcgccttttcgctcgattccgccgggaaaatttccactacatcgccgcgcacgcggaacttattgcgcgtaaagttgatgtcgttgcgctcgtactggatctcaacgagcttctgcaaaagctcatcgcgacttttttccatgccggggcgcagtgaaatgaccatcgtgcggtaatcgattgggtcgcctaagctgtaaatgcacgaaacggacgcgacgataatgacatcccgccgctcagaaagcgcactggtggcgctgtggcgcagcttatcgatctcctcgttgatggcgctgtctttttcaatataggtatccgtctgcgcaatgtacgcttccggctgatagtaatcgtagtaggaaacgaagtattccacggcgttatccgggaaaaactcgcggaactcgctgcaaagctgcgcggcaagcgttttgttgtgtgccaaaacaagcgtgggacgattcaattccgcaatgacgttcgccatggtgaacgttttgccgctgcccgtaacgccgagcagcgtctgctccttatgccccgcgcggatggactccacaagttctttgatcgccttcggctggtcgcccgtcggctgatattttgacttcagtacaaatttatcccgctcctgcatggatttgctccctcactgaacttttagaacatacgtttcgatacgacttagtataacacacgaacacccgtttgtcaatgcgtcccgccatttatgtccgccgacgtcctatgatgttcggcttttcactgtgtattatttgtcccctcacttggcgccgctataatttcttcgaccgaatacggatttcggttgacccagaagtggtcgttatcctcccatgcgagctgaaaccggctttcgcttttaaattggcacacaagccatctttcgggtgggtcggattcaaggcttacaagatacacgtcagcatctgtgcctgagaaaatatttttcttttccccgtaaaaaacgacgctgtaccgcccgtcttcggaggtgctagacatcatttcgtggtaaggctccagaacactgccgctcgaattcgggataacctgcgtgctgacaataatgaccagacacacggtgatgacaaagaaaatgacgctaaacagatggtcttccgccccgagtgggtcatgcagtgcggagatcagcgcgcacacaatgtaattcattgatagcacggcgtatgcaccgagaagaactgcctgcacccatgcaggggcagcattcccgccggtctgctcgaaaagcatgtaaagcggtataatcagtagcatccacaaaaagaaaacaccgagtttcttgccgccgctccaccgcgcgagcatattcagcataggatttatgaaagtaaatgaagatttggaagacatgggtttttcctttatgtgatgatctgccgttttagggtggcgatgtcgtggcgaagcttttggaggacgccggtcgcgcgcatggagaggtaatcctcgtccgtgaaaatgaagtggtcggagaggatgacgtctatgccggagagtgcgagctcgatctccttggttgtttggatgtcctgccgtgagggcgtgcagttgccgcttgggtggttgtgcgcgaggtaaatggcatcggcgtcgtacaaaaggcacagccgggcaatctggcggatataaataggcacgccgtgcacggagccctcgttgacaatgcccatgtattttaaataccccttgctgtccaaaatgagcagcacgacgatctccgtttttctgccgaaaaatttgttctgcacggcggcaaaggcggttttggtatcgacaatacgggtgcgcgcctgatttttcgactccatataggcacggaacaagtccgggtaagcggcgagcgcacttgcaaggcgcgggccgacgccggggcactccgccaaaatctgcgcgggggtatcaaacacgtcgctgagttttccgtgtcgctccaaaagtgcggccgccgttgtttgtgcggggcagcttgggtccaaaaggtgcagcgcaaacgtcaaaatatcgagctccgtagggttagacgtggtattcagctttaaaaactccgcttcctcttccctttttcgtcttgcggccatggttttcatccctttcaaatgcttgaaaaagggcagcaccgcctatgggtgccgcccggttttcagcggtcgatataacgttcgataaagctgcgcacagcgctccaatagagctttggcgcgacggaggcggaaaggcagtggcctgcacccggcacggtaagcagctgcttatcgcagtttgcggcttcgtaaaggcgatacaccatggcgcacggtacaagggcatcagcctcgccgtgaatgaacagcacgggaattttacagcggcgaatctgattaagcgcactcgcttcgcggaagctgtacccgaacttcactttggacgcaagcgacaccgccgggataaacacacccattgcgccgccgtacagatctttgacagcggctttggcctgatcccacacagatgtgtagccacagtcttcaatggcgagcttcacctgcggcggcagctgctcgcccgccgccatcatgacggtggcagcgcccatggattcgccgtagagaaggatctgcgcgtctttgtcgcggcgaataatctcgtaaatccagccgatgatatccttacgctccggccagcccatgccaatccagtcgccggcgctgtcaccgtgggcgcgggcgttcggcattaaaatgttaaatccgaggtcataaaacgacttgccgcggtggcgcatgcactctgcgcggccgccgtagccgtggcagatgatggcatagcggtggcctttgtgcgggatgaaccatgcagtgaggcacatattttcggggttgcggtacgtgacgcgcttggcatactttttaaaccacgctgttgccgcacgggtttcttcatcgtccggcagcgggtctttgttcggcgggcggcggcgcagggtatcgtttaaaacggcgttggagacaaccgcggccgcacctgcagccaatgctgcggcgaatagtgcttttttacccataaacacgcactccttttggtttactttgtgtggacagcgatgacggtatcgatgtcatcgggcagttttacagtgttggaaacctgcacgaacacgacgtccgggtagttttcaacgatccagtttttaaggggctttatctcggtgccgtcggagatgagacggatagactcaacctcatcgagcgaaatgccctgcagcgggataccgccgatggagttttccataatgtgataatagagcgttttgccgtttctggtgatgcgaccgttttcgggcttcggcaggtcgcagctgccgcagccgtaaatagaatcggaattcttctgcatccacgcgccgattttttccagaatctcgacggactctgcggggatattgcctctggcatccgggccgacatttaagagcatattgccgtttttgctgacgcactcaacaagctttttgataatcatttcggcgggcttaaagttcttatcctttgcgcagtagccccagttgtcgttcatcgtaatgcaggcttcccaacagatattgcggccgcggctgtctttaaagccggtctgcgggatgatctgctccgggctgacatagtcgccgctgtactcaagcggttcgtccgttgcgatggagccgaagccactgccgctgacctccagacggttatcgatgatgatgtccggctgcagggagcgcaccatacgcacgagctccgacgcacgccacgcttcgccggtgaggtcatcgtaggaaaagtcgaaccacatcatatcgagcttgccgtagtttgtgcagagctcgcgcacctgaccgtgcatgtaatcgaggtagttatcaaagttatagggcttatctttataggcaatgttgttgcgcataggatgctggcggtcgccgtaggcggggtaatccgagtggtgccaatcgagcagcgaataataaagaccgaccttgatgccctctgcgcggaacgcgtcgagatactcacgcacgatgtctttgccgtaaggcgtgttcgtgaccttccaatcggtaagagcggaatcaaacaggcagaagccgtcgtggtgctttgcagtgagcacggcgtacttcatgccggcctgctttgcaaggcgcgcccactttttcgggtcaaaatctttcggattaaactcgttgaaaaacgggatgtagtcctcctccggaatctcttccgtagagcgcacccactcgccgcgcgcagggatggcgtaaaggccccaatggatgaacatgccgaagcggtcgtgggtaaaccactgcatacgcttatcatatttttctctatcaaatttatacatacaaactccgtcctttcgcccgctatttcggggattcttactgtgattgtatcattttgcccggcttttgtaaatagatattcgcgcgaaaaaaggaatgaaaagcgcctcgcaaacagcacggtagatgcgcgtgagcgcgacgccctatccccctgcaattatagagcaaccccgttgcctcttttaaatcgagaagcggcgttgttgcgtgtaaaggagtatagctttatatttatgtaaagctatacagctgcacagatatgcaaaaacgctcgtccgctgataaactgggacgagcgttttgttcacttattcaagcggatttccgatcaatcagaagttgccgttggtgagatcctcgacgtagagggtcttcgggccgttgttggccggtgctgcgggctttgcagccggtgcagcttctgcggcaggtgcttcatccttatgcggattgtcgcgccactcaaagaactttgtagcaacagccgggaacagtgcgtaggagaggacatcctcttcgctctttgctctgtcgccgatctctgctctgtacttctcaagctccggctcaatgaggtcggcaggacggcaggtgatgaccttgtcatcgccgatgcacttcttgcggacttcctcattcacctcgcccggcagcttgccgtattcgccgcgcagcatgcccttgctctctttggtgaccatcttatagcgctcaccgacaagaacgttcataacagcttgcgtaccgacgatctggctggtcggggtaacgagcggcgggtaaccgaagtcagcacggacgcgcggcacttctgcgagcacatcatagtacttgtcttctgcgtttgcctgcttgagctgagagataaggttcgaaagcatgccgcccggaacctgatacagcagcgtgttggtatcgaccttaaggaccttcgggttaatgttcagcttatcggcaaccgtacggaagtgtgcggcaacctcgctgagcttctcaaggtcaaggccggtatcacggctggtgccctgcagcgtggcaacgagggactcggttgccggctgagaggtgccgtttgcgagcggggacagtgcgcagtccacgatgtcaacgcctgcctgtgcagccatcaggttgaccatgtcgcctgtaccggtggtgttgtgggtatgcagatggatcggcacgctgacgttttccttcagcttctttacgagcgaatatgcgtcgtacggaaggagcaggtttgccatatccttaatgcagatggtatctgcacccatcttttcaagctgcatagcgagctttacaaagtaatcctcgctgtgcacggggctctttgtatagctgatggcagcctctgccttgccgccatattccttgacgtacttcatagcggtctccatgttgcggggatcgttcagtgcgtcgaagatacggacgacatcgatgccgttttcgatggactttttgcagaactctgcaaccacgtcatcggcatagtgcttgtagccgaggagattctggccgcgcaggagcatctgcaacggggtcttcggcattgcctttttgagcgttctgagacgctcccacgggtcttcgttcaggaaacgcatgcagacgtcgaacgttgcgccgccccagcactccagagaccagtaacccatgttgtccagcttttcgcaagccggaagcatatcctcgatacgcatgcgcgttgcggcctgagactggtgcgcatcacgcaggatggtatcggtaattctaaggggattcttagccataataactgttacttcctttcctaagcgttatcaaacgccgaacagagccaggaacacaccggctgcaacagcagaaccgatgacgcctgcgacgttcggacccatagcgtgcatgagcaggaagttgcgcggattctctttctggccgacgacctgcgatacacgagccgccataggaacggcggaaacaccggcggagccgatgagcggattgatcttatccttaaggaagacgttcatgagctttgcgagcagaacgccgcctgcggtgccgaggccaaacgcaacaacgccgaggacaagaatcttaagcgtctgcggattgaggaagtttgcagcggtagctgttgcaccgacggaggtgccgaggaagatcgtaacgatgttcatcagctcgttctgtgcggtcttgttcagacgctctgttacgccgctctcacggagaaggttgccgagcatgaggcagccgacaagggacgcagcggacggcagcatgagggaaacaaagatggtaaccacgatcgggaacagaatcttctcggtctttgtaacctgacggagctgcttcatctggatcatacgctctttctttgtggtgagcgccttcatgatcggcggctgaataaccggaacgagcgccatgtaggaatatgcggcaacggcgatcgggccaaggagttcaggtgcgagcttggaggtgacaaagatggccgtagggccgtctgcaccgccgatgatgccgatggagccggcctgtgccggggtgaagccgagcaggacagcgccgacataggtgacgaagatgccgagctgtgcggcagcaccgagcagcaggctcttcgggtttgcaatcagcggaccgaagtctgtcatgcagccgacgccgatgaagatgagacacggataaacaccgagcttaacgccgagatagaggacgtcgagcagaccggcagcttccgtggaaccgtttgcgagtttaacaccttccgcaaacatttcccaatgcacatgaccgccttcaaacagctctgcatggtaaatgcctgcgccgggcaggtttgttaaaagcataccgaatgcaatcggcagaaggagcagcggctcgaacttcttgacgatagcaaggtacagaagaacacaggaaacagcgagcataacgagctgcagcgggttttcgccgagctttgcgaagcctgtgctattcagaaaattagttatcgcttccatgaataatttaacactccttattttagtagtatgtgcgtaggcttaagtttaacttagccaacaacgcagaggagtgtgccgctctcaacggttgcgcccttctggacgttcacgctggtgaccttgccggccttcggtgccatgatctcgttttccatcttcatagcttcgaggatcatgagaacctgaccttcagcaacggtatcgccaacattgacgttgacggaaaggatgttgccgggcatcgggctcttgacctgctcgccagcgcctgccggtactgcgaccggggccggagcgggtgctgctgccggagctgctgcaaccggagccggtgctgcgccgccgacgacttcttctactgttacttcataagctgtgccgttaacattgacattatactttttcattgaacttacctctcatctgttagatttcgcgctttgcgcatttcagactcttttgatggaatggatgcggatgtgcgaaacgtccgtgcccatctcctcggcgatcgcgactgcgatagcggcaacgatctgctggttgttttgggcggataccgccggagcgggtgctgcagcaggtgctgcggcggccggggctgctgccggagccggctgctttttagcgaccttctccatgatgaggccgaggatcttgatgataacaatcaagcagatcaggaccacgaacacggtaataaggcccatcagaacaacctgaacggtgctgatgttggtctccataatcttacctcctttcaccgaagcgttatggaaataaaaatagaaaatgtaatttgcattctgaaaaaaacaccacattcccgcattttatcagaatggttatatcttaacacggaattcaaaatttcgcaatgcttaattcaacttttttaaccgatattttcggaacgaaagtctgtttggaataattcccgtttgaacgccgaaaatcaggcaagaacacaccgtttctctccgattcaaaatattgacgaaaaactttcttttatcccgttgcattttagtagaaaacatagtaaaattgaattatctgctatttagcatgggctttctttccaaaaaagcgaatagactgcccaaagtattgaaatgaggcgaagacgtgttttcaaacaaagatctgcggaagctcatcataccccttgttattgagcagcttctggccgtaaccatcggtatggcggataccgtaatggtctcctcctgcggcgaagcggcggtttccggcatctcccttgtggactccatcaactttttgctcatcacgctgttttcttctttggcaacgggcggcgcggtcattgcgtcccagtatatcgggcgcggcgaccacaaaagcgcaagtcttgcggcaaagcagcttttctatgccagccttgcgctttcggccgtgctgggcgtcatcgccgtattcttccgcaagccggtactgaacatggttttcggctccattgaagcggacgttatggcgcacgcgcagatttattttttgctttccgcgatctcctatccgttccttgcggtctataacgccggtgcggcgctgttccgctctatgggcgattcgcgcacgacgatgctcatttccattttaatgaataccatcaacatcgtgggcaatgcgattttaatctacggcttccagatggctgcggcgggtgcggcgacggcttctcttgtttcccgtgcagtaggcgccatcatcattacggtgctgcttttgaacccgcgccgtattattttctatgataagctccataagccggaaatccacctctccatgttgaagagcattttgcagatcggcgtgccgaacggccttgagaacagcattttccagattggcaaaattctggttgcaagcattgtttcgggcttcggcaccatttccatcacagcgaacgccgtggcgggcaacctcgcttccttgcaggttattccgggcatggcgctcggcatggcgatgatcacggtcgtcggccagtgcatcggcgcaaaggactacgaagctgtgaaaaagtatacgaagaagctgatgctcatcacctacggtgtcgtctgggctatgacgcttttgatgctgctgttcagcaagcagatcctttcgttctactcactctccgaggaaacgaccacaatgacgatggaggtcttcattgtgcacggcatctgcgccgtcattgtttggccgctggcctttgccctgccgaacgccctgcgcgctgcgaacgatgtgcgctttacgatgattgtttccctgctttccatgtggatcttccgcatcggcttcagctacattctggcgatctactttaacatgggcattttgggcacatggattgcaatgtgtatcgattggttctgccgcggcgcctgctttgtcatccgctttgcgcgcggaaaatggaagaatatcagctttattgataactaagaaggaggtaaaactgtatggaatatgatgcttttaccggcggcgttgcgccgggcggactgcgctcgaaaagcgatatccgcattttgatctgctatatgctcaaaagcgtgaacgcgccgctttcgggcgatgacatcatcaaggtcttgcaggaaaaatcccttgcgaattactttgaggcgagcgatgcgctttctgcccttgtgagccttggcaatgtcacccgcgaggaggacaacacctacgtgctgactaagcgtggcaagagtgtggcggacgacttagaacagcttatcccctcttccgtgcgtgataaggccgtagccgctgcaacggctctgctggcttccgccaagatggagcgcgaaaacgtggcgaccattgtccgcaccgaaaatggctacaacgtgacatgccacatttccggcggggaaatggagctgatgagccttaccgtgtatgtgcccgacctctatcaggcacgtgaagtgaaaaaaaactttcaccgcgacccacagcgcgtgtataacctgatgctcgcggcgcttaccggcgacgacgagatgatgaaaagcgccgtaaacccgtgagttttcgtcacctttaaaattccgaagagccgcagtttttgcggcttttctttttcttcacttcctgtttttctgaacattctgcacttgtcgtcaaaaaccgacatttttctgtatgtgtattgtgtatacttgtatgtgaaaacagtttgagtttgcacagaatatatacatcatccgtgtgaatatttctcacgtagtcgtgcatagtggcgcaaatagcgtatactattattgtatctgctatttgtatctcacgcaaaagatacaacacagttatgtgcacgattttcacagaatgacacagcggatggtgaacagcattggaggaaatagaatctaaagcaatcttcggccaacgtctcaagcgtttccgtgaagaaagcggctacacgcagtcgatccttgcgaatattcttggcgttgaacgttccacctacacgtattatgaaaccggtaaaacgacgcccgtcatctttgacctgatgcgcctttgccgtctttaccgcatttctttggatgagctgtgcggatacagcgcaaactctgcagacgcgatgcgtctgagcgattccggtcagcgcgtgaaagtgtatgcacgccgcaaagagcgtcgttaccttgccgattctgtgctggatctttctacagatgagcagcagcttttggcgtattatcgttccgcttccccggaagatcgtgcggagctttttgaacatctgcgcaatgcacggtaccgtgaccgccgccacgcaaacgcaaaataaccttcaaaaatttcatatgcgcttgtagcccagttggatagagcgacagactccgactctgtaggccgctggttcgaatccagtcaagcgcgccaatgaaaacccgcatgaacgctgatgttctgcgggtttttgatttatctgtaacgcactttatgttttaagccccccgctttccggctgattggtcgggcagcagacttttcaaaagaaaaaaagatgaacaggaatggtaacccccgttcctgttcactgaattattggaattctaaaaatagatcactactaccactaattggtcaatagagccattttcattttcttcacatattctccgatgtatttcggcgcgtcctttccatactgttcaagcagtttgatgattgctgagccggcaatggcaccgtcagagatattcgccattttctttgcctgctccggtgtggaaataccgaacccgacagcacacggtacatccgtgttttctctaaccaccttgacaatagaggcaaggtctgtattaatctcactccgtgtgcctgtcacgccgaggctggaaacgatgtaaatgaagccttccgcttctttagcaatcatagcgatgcggttttccgaggtaggagcaatcagtgaaatcagattaacgccatattgtctgcatagcggctgaaattcctctttttcttcatacggaagatcgggtaggataagtccgtcaataccaatatcgcaacaagtagaaataaatttttccgcaccgtaggagaacacgacattggcataggtcataaagaccatcgggattttcacatcacggcgaagttcttttacaaaggcaaatattttatccgtcgtgataccgccggtcagtgcccgcaggtttgcgccctgaataacgggaccctctgcggtaggatcagagaacggaataccaagttcaataaggtctgcaccgttttccgcagcggcacggacagctttggcggtggttttcagatcagggtcgccacaggtgataaaggcgataaacgccttgccgttttcaaatgctttctgaatcttactcatggatatcctcccctctgtaacgggcaatggcggcgcagtctttgtcacctctgccggaaatggtaatcacgatgatttgctccttgcccatggtcggtgcgatcttcattgcgtgtgcgacagcgtgtgccgattcaatagcaggaataatgccctcggtttttgccagatattcaaaggcgtttaccgcttcgtcatctgtgattgggacatactcggcccgtccgatatcgtgcagatgtgcgtgttcaggtcccacacccggataatcaagtcctgcggaaatggagtaaacgggagcaatctgaccgtctttgtcctggcagaaataggacttcatgccatgaaaaattccaagtctgccggtggcaatggttgctgccgtttcaaaggtatcaattcctctgcctgccgcttcacagccgatgagctttacggatttgtcgttgatgaaatgatagaagctgccgatggcattggagccgccgcccacacaggcgattaccgcatcaggaagtcttccttcttttgcaatcatttgctctttgatttctttagaaatgacggcctgaaaatcacggacgatggtcgggaacggatggggacccatcaccgaaccaaggcaatagtgggtgtcgctgacgcgagaagtccactcacgcatggcttcggaaaccgcatctttgagcgttgctgtccccgtctttacggggataacctctgcgccgagaagccgcatacgatatacattgagagcctgacggatggtatcttcctcgcccatgaaaaccacgcactccatacccataagcgctgctgcggttgccgcagcaacgccgtgctgacctgccccggtttcggcgatcagacgtgttttacccatcttctttgccagaagtgcctgaccgagtacattgttgatcttgtgtgcgcccgtatggtttaagtcttcacgcttgagatatatttttgcgccgccgagatccttcgtcattttttcggcatagtacagccttgacggtctgcctgcgtattcattgaaaagctcggtaagctctctgttgaactccgggttgtttttataataattatacgcttcttcaagttcaataaccgcattcatcagtgtttcgggaatatactgaccgccgtgaatgccgaagcgtccgtttggattcgtcataatctttcttcctttctgacagcggcaacaaatgccgccattttttctttgtcctttgttccgcctgtttctatcccggagctaacatcaacagcaaagggatgtaatgttgcaacagcttttccaacagtatcgggtgagagtccgcctgcaaggaaatagggcctgcgtatgttcatcaaaagtttccaatcaaataccgtacccgttcccgcaccggagtccaacagaatataatcggcggagcaccgttctgcgtcagcaatatcattttccgtttctacccgaaaagccttgatgatcggtttatcggtgtgttgtttcagtcgcctgatatagtcctcatcctcgtccccgtgaagttggataataccaatgatgccgctgtgcaacagttccgtgatcttcttcggactttcgttgacaaacacaccgactgcctgtatttctgtggaaagcagttgctttaactctgctgctgcctgcggtgtaacataacgtctgctttcgggggcaaatacaaatccgacatattcgggttttagttcgttgacggtttctatatcttccgttctggatagtccgcataacttgattttcgtcatactgcaccccgcagttctgccagctttgctcttttatcagacgccctcatcagtgtttctccaatcaaaacggcatcagcgccgattttacgaagtgtctccacatcctcagcggtccgcacgccgctttcggaaacaaacagtacaccgggaggaatcaactcccgaagtctgcgactgttatcggtatctaccgaaaaatctttgagattacgattattgaccccgataatacgtgctccggcattaattgccgtttgcacttcctgctcgtcgtgtacctcaaccaaagcggaaagcccaagttcatcgcaaattctaatgtagtccttcatctgattttctgtcagaacggaacagattaacagaaccgctgatgctcctagaacctttgcctgataaatctgatattcgtccactgtgaaatctttgcgaagacacgggattaagactgcttcggctatttctttaagatactcgtcatttcccaaaaaccatttcggttcagttaagacggaaatacaatctgctcctgccgtttcatattcctttgcaatctccaaataaggaaagttcggtgcaatcaaacctttagaaggggatgcttttttgcactcgcagataaaagaaactcccggctttttcagtgcttgttgaaaaggaaaatccccttttggaagggataaagcctgatgccggatttcttccggtggcaggactctttttgcctgctcggtgcgttgacgagcgtggtccgcaagctgctcgagtgtcgtcatgcctccacctccgggcggttactgacttcgattaactgattcagcgtttcgagtgctttgccggaatcaatcagttttgcggcaagcgcaacgccttcctttatgctgtccgccttaccgccgatataaagcgctgcacctgcgttcatcaacacagcatttctcttgtgacccttttcgccatttaagacagcaagggtgattttggcgttttcttcgggagttccgcctttcaagtcctcttttgtgcagcgttcaaatccgaactcctccggcgtgattactgaggatttgaaccagccgtcacgaatctcgcagaccgttgttggcgcactcacggaaatttcatcaagcttatcctgcccgtatacaaccatcccatgttcgatgccgaggctgatcaatacctgtgccagcggttcaaccagataagcatcgtacacaccgagaagctgcatggacggcgttccgggatttgtgagagggccgaggatattgaatacagttcggaaaccaagttccttgcggatagcgcccacgtacttcatggaagtatgatatttctgcgcaaagaagaagcacatacccacctcgtttagaagttctatgcatcttgctggactctgttgaatgtttacgccgagagcttccagacagtctgctgttccacactgggaggacgcggcacggttgccgtgctttgccactttcataccgcccgccgccgcaacaagggcggaggtggtggaaatgttgaagctgtgggcgctgtcaccgccggtaccgacgatctcgaaaagcttcataccggtttcaacctttgttgcgtgcgctctcatagcagctgcacagcctgcaatctcatcggtcgtctcagctcttgcgctctttgtggacagggcggcaagaaaagcagcattctgtgtagctgtcgttttgccgctcataatttcgttcatgacggcgtacgcctcgtcataggtgaggtcttctttatttacaatttttacaacggcttctttaatcatcactcatatctccttaacaaagttttcgatcatctgttttccgtccggtgtcataatagattcaggatgaaactgtacgccatagacgggatattctttatgctgaaccgccatgatttctccgtcgtcggtaagcgctgtgaccttcaagcattccggtatggtattggcagctgctgcaagggaatggtaacgcgcaaccggagcaacttcgggacaacctgtaaataacgggcagaaaatatcgaacttcacgttcgactgtttaccgtgcatccgtttctttgcataagtaaccgttgtgccaaatgctgcacagatcgcctgatgaccgaggcagacgcccaaaacgggaatatccttgccaatcgttttgacaacttccataatagcccctgcgtcctccggtcttcccgggccgggtgaaagaataatgcggtcggggtttagttccttaatttcatcaaccgtcatttcatcgttgcgtatgaccttgatattcggctcaatctcgccaacgagttgataaaggttataggaaaaactgtcgtagttatcaatcaaaagaatcataattcttcctcctgtgcaagctccagcgctttcagtgaagattttgctttgttcaggcattcttcgaattccttttcaggtacagaatccgctacaatgccggcaccgcttcgcacaaataccttgccgtttttcttataagcaatgcggatggcaatgcaagtgtccatattgcccgcaaagtcgatatatccgatagcgccgccatagataccgcgtttgttgttttcaagctctccgatcaattggcaagctcttatcttcggtgcgccagaaagcgttcctgcgggcagcaccgcttcaatggcgtccagagcatctttaccttcacaaatctcaccgcgtaccgtagagccgatgtgcatgacatgagaaaaccgttcaacagaacggagcttctcaacctgtacggtgccaaatctgctgatttttccgagatcgtttcgtcctaaatccaccagcatattgtgttcagcaagttccttttcatctgcaagcagttctttttcaagcgctttgtcttcctccacggtctttcctctcggtcttgttccggcgagtggaaaagtgtgcaacacaccgttttccagcttgaccagcgtttcgggcgaagcacctgccacttcaacatctgtcccagagaaatagaacatatagggcgaagggttgatggttcggagtacacgataggtattgagcaaacttccttcaaaaggggcagacagacggtttgaaagcacgatctgaaaaatgtcgccctcacggatatggtgtttcgccttttccaccatatcgcaaaactgcactttgtcaaacagcggtgttacttcaccgagcagcctgccgccgggatccttcttcttttctccgtttttaagaagctctgcaagctgtttcaattccataaccgctttgttgtatccgacctccacatcgtccagcggcatattgacgatgagaataattttttgtctcaggttgtcaaaagcaataaccttgtcaaaaagcatcaagtccacatccttgaagttttcggtatcttccacgatgcattttacgctcggttcactgtacccgaggtaatcatatgaaaagtatccgacaagcccgcccgtaaaggatggaagataatcaaaacggggacttttgtaatccgcaagaatctgtcggagatagcctgatgggttttccgtttttactttaagatttccgattttcatttcaccgtccatgcaggtgatttccattttcggattgaaaccgaggaatgtatatcttccccatgtttcgtttgcttgggctgattccagcatatagcaatgggtagatacgtttttcagtatcttcatggtttcaataggtgtggtaaagtcggaaagcatctcgtagctcaccggaagtacattgtatttcgcatctgaagcaagcttttttacttcagctaaagttggcagaattttcatttgttacacctccaaaggatatcgttacgttcatttgcattttgatactcaaaattatcaggcgccgggtgcgccaccatcgttttgaaaactccgtatcgtaacctcctttgaaaaaggaaaaactcctttgacgttatatcttccgtcaaaggagtctcaaaaaaaacgtccttgacagaaatatactttctgtcaaggacgaacaaaacacttatccgcggtgccaccttgattcacggcatgacccgtgcacttagcaggatacctacatatccccggcaaatgacgtctgcctgcaacgtcgcagaatactttgtgaaatcacatttgactgcgccctcagcggtccatttgacagcttgtttcttacctgactctcagcaacacaggctctctgtaaaggcatcgttatctccgcggaaaaccaacgatcccatcccgcagcggaaacaagtttcagtgtcactgcggcttttgctgttgcgtttacgggctgccgagcctgtatttgaaatctctgtagccgaacgacactaacttgcggatatcgccgcccgctgtgcgggaataaatgccgggcaggggcatgccgttgaaggtattgtttttgcaggtggtgtagattgccatatcgccgaagacgagcaggtcgccgaccgcgggcacagcgtcgaagctgtaatcgccgatgacgtcgcctgcaaggcaggttgggccggcaaggcgcaccgtgtacggcttctcccccggctcaccggcgccgagcagcggcggacgatacggcatttcgatgacatccggcatatggcaggcggcgctggcatcgagaattgcgatggtcgtctcgccgtttcgcacgacatcgagcacgcggctgaggaggtacccggcgtttaacgcgcaggcttctccgggttcgagatacacggtgacatcccagtcctgctgcgcgcggcggatgcagcgctccagcgtttccatatcgtagtcgggacgcgtgatgtggtggccgccgccgaagttgagccactgcattttgggcagcaaatcgccgaacgttgaagcaacggcgtttaaggtcgtttccagtgcgtcggcatcctgctcgcacagcgtgtgaaaatgaaggccgtcgagcagttcgggcaaatgcgcgtcttcttgaacggctttattccactgcgcacgggtggtgccgaggcggctgccgggcgcacagggatcgtaaatttcgtgtccctcctgcgtagagcactccgggttgatgcgcagaccgacgcttttgcccgcagcttttgctttgggcgcgaacttttgcagctgtcgcggcgaattgaacacaatgtgatccgcatagcgcagcagctcgtctatttcgtcctcacggtaggcggcgcaaaacacatgaacctccccgctcggcatttcttcagcgccgagccgcgcttcaaacaggccgctcgcttccgtaccggccaaatgcggcgcgaaaatcggataaagatcataattgctgaacgccttctgtgccaaaagcaccttgcagcccgtgcgcttttgcagcgcgccgagcacctctgcgttatgctgcaggacggcctcgtccatgaggtagcacggtgtggacagcgttttaaattccggcggaatttcgccgttgatgcccgcaaacggtgggcgtgtatccagtaagttcatcagtccaccaaagccggatcgtggttttcgctgcgcggcaggccgtatttatcaagggcatcgaggaacggatccggatcgaactcctcaacggtgtagacaccgggctttgtccacttgccggtgagcatcatcagcgcgccgcacatggccggcacgccggtggtgtagctgatagcctgactgccgacctcgcggtagcattcctggtggtcacagacattatagatgtagtaagtcttttctttgccgtcctttttgcctgtgaagatgcagccgatatttgtcttgccctttgtgcgcgagccgagacttgcggggtccggcaaaagtgctttgagaaactggatcggcacgatctcctgaccgttgtagtgaatcggtgtggtggaaagcatgccgacgtcttcgaggcagcgcatgtggtcgaggtagctctggccgaacgtcatgaagaaacggatacgcttgacctccggcaggtttttgccgagggactcgatctcctcgtggtgcagcaggtacatatccttctggccgacctgatcgaaggtatacgcgcgcttaatgctcatagccgggatttcgacccagtggccgttttcccaatagctgccgggcgcagaaacctcgcgcaggttgatctccggattgaagtttgtcgcgaacgcataaccgtgatcgccgccgttgcagtccagaatatcgatggtatcgatggtatcgaactcgtgctttttagcgtaggcgcagtacgcctgcgtgacgcccgggtcaaagccgcagccgagcagtgcggtgaggccggcctcttcaaacttctttttgtatgcccactgccagctgtaatcgaagtaggcggagaagcccgcttccttgcagcgcttttcgtaaatggcgcgccattcggggtcatcggtgttctccggctcgtagtttgcggtatccatgtagttaacaccgcaggcgaggcaggcatccataatggtgagatcctgatacggcagggcaatgttcatgacgagatccggcttgtagctttggataaggtcacaaagctgctgcacgtcgtctgcatcgacctgtgccgtggtgatttttgttttggtgatgggcgcaagctttgcggcaagtgcatcgcacttggactttgtgcggcttgcgatgcacagctcggtgaaaacttcgctgacctggcagcatttggaaatggcgacaccggctacgccgccgcagccgataacgagaactttgctcatgatgatgctccttttatatttttagttttataatttatacgtttaaggccaataagagctcgcgcaggactttgcaggccatggcggtggaagcgccgcttgcgtccagcatgggggctaactcgttgacatctgcgccgatgatgttcgcctttgacacggtgagaatggcgtttaatagctgcatgaacgtcacgccgcccgcctccggtgtgccggtgccgggaaaacacgagggatcaaggcaatcgagatcgatggtgaggtaaaccggcacctgcgtgcggcacagctctgccgtgagtgcttcgaggcccgagaaatcgaacttatgcatatcggtgtgcgtcttcgcaaacgtaaactcttccctgtcgccgctgcggatgcagaactggtgaatgcggccgtcgccgagaatgtcgtggcagcggcgcagcacgcaggcgtggcttaattcggcgccgaggtaatcctgacgcaggtcggcgtgggcatcaaagtgaatgatgtgcatagcgggatatttacgcgccgccgcacgaacagcgccgagcgtgacaagatgctcgccgccgagcaaaagtgggaatttgccgtcttgcaggatcgtttccgcgcgcgcttcgatgtctttgagggcgctttcgctggagccgaagcacagctccatatcaccgctgtcaaacaccttgatatcggttaaatctttatcctgatacgggctgtatgtctcgaggccgtagctttcgtgacgcatggcggcggggccgaaccgtgcgccggggcgatagcttgtggtggaatcgaacggcgcgccgtacaaaacgatatcggcatccgcgtagctgctttcgcagccgatgaaagtttcaatattctggtgcagcattatttttcctccacttcccgcagcatttcctccaaaaatgccggcagataaaatgcgccgacatgcagacgagtggtgtaatagcgcgtgcgcatattgagcgcgttccactggttggagtcaaggtcgttgattgggtgatatttcttgcttgcaaagccgaaaagccagtagcccgcggcgaaggtgggaatatgcgcctgataaaccttgctgatgggaaacgtcgttgcgatgcgctggtggctgcgctgcatggcagtggcatcctccgcatagaacgggctgccctgctggttgaccatgatgccgtcctcacgcagagcattatagcagcttccgtagaattcgcgggtgaaaagcccctcggacgggccgaacgggtcggaggaatcgacgatgatgaggtcgtactcgtcttcacacttgcgaatgaacttcagcgcgttttcgtaatagatatgtacacggcggtcgtccatgcggcaggcgttgctcggcaggtaggcgcggcaggcctcgatgacctgcgggtccatctcgacgaggtcgatgcgctctacgcggtcgtagcgggtcagctcgcgcacaacgccgccgtcgcccgcgccgatgacgagaatgtcctttgcattgcggtgcacggacatcggcacatgggtgatcatttcgtcgtagataaactcgtcgcgctccgtgagcatgacattgccgtccagcgtcagcacgcggccgaactccggcgtttcaaaaatatcgatgcgctgataggcgctttgctttgaatataactggcggtccacacggatgctgtgcttgacatccggcgtatgaaattccgaaaaccacatttccatttttgtccctccttatgcaagcacgttcaggcggaggatatcgggatcctccgggccggtcatgctgcagcctttggctttggcatattcgatgtaatcgaggatctccgccgtgatgcgttcgcccggcgccaaaatcggaatgcccggcgggtagcacatgacgaactcgctgcacaccataccctccgtctcgcggagcggcaggctctttttcggtgcgtagaacgcctcctgcggactggcggcaacctcggggtcgatgtactcctggctcaaaaggccggtgccgtccgtgctgtaccggcgcttgatctcggccaaagcactgacaagacgctccacctcctgcgggcggtcgccgatggaaaggtatgcaaggatattgccgatgtcgccgaactcgatctgaatatcgtattcgtcgcgcagaatgtcgtagacctcgatgccggcaaggccgatgtcgagcgtgtggacgctgagctttgtcgtatcgaaatcgaacacggagttgccgttgcagagttctttgccaaacgcgtagtagccgccgacggcgttgatctcctcgcgggcgtattctgccatatcggcgacctgatggaacactttgcggccgcgcagtgccagattgcggcgggagatgtccagactggacatgagcagatagctgcccgaggtcgtttgggtgaggttgatgatctgccgcacataaccggcgtggacattggggccgatgagcaataagctcgactgtgttaagctgccgccgcttttgtgcatggaaacggccgccatatccgcacccgccgccatagcggagaccggcaggccgccgccgaaataaaagtgcgtaccgtgtgcttcgtccgcgaggcacagcataccggcatcgtgcgccatttgtacgattgcgcgcaggtcgctgcaaatgccgtagtatgtggggttattgacgagcactgccacggcgttcgggtgttcgcggatggcttttgccacctgctcgcgcttcataccgagcgaaataccgaggcgatgatccacctccgggttgacgtagaccggcaccgcgccgcagagcaccaaagcattcaaaacgctgcggtggacgttgcggggcagaataatctcatcgccgcgtttacatgcggtgagaaccatgctctgtacggagcttgtggtgccgcccaccattaaaaacgcatgtgccgcgccgaacgcatcggcggcaagctcctccgcctcccgaatgaccgacaccgggtggcagagattatcgagcggcttcatactgttgacgtccaacccgacgcactgctgacccagaaaggcggccagctccgggttgccgcggccgcgcttatgacccggcacatcaaacggcaccacgcgcatgttgcggaatttttcgagcgcttcatggattggtgcgcggcgctggtcgagctttgcgcgttttacattttcgttcatcttttccctccgttcaaagccctttgcaaaacaaaaaacgcaagcccggcacgtaggtgcagaacttgcgtttgaatcgcttattttttgggcgcatgttctcggaacataaaaacatggcatcccggaaagcggagcgtttcagagtctatatagcaattaaacttttactactcttattgacgtttcacaagtctgcgttttagcgcaatttcatggttgcaaaggaaccatcttataaaatctgagctttttaactcagtcaataaggcagccgaagctgccggtcggcagtggacccggctgtccgtatggccttagcccaaaagggcggtccaaaagtaaaaattgctttgaaaaactcttacatctcacttcgtctttcaaaatcgatatgagtatatcataaacgacaaatcgtgtcaacaaaaaatttggggccgcattatttccagccgcgggcggtggggtcgagcatttcggctgcggaatatatgagcgcattgcagacggcggcggctatggtgctgccgcccttgcgcccaaatgcaacgatggcggggacgtggtgcttttcgcacacggcgaaaatgttttctttgctctcgatgacgttcacaaagccgaccggcacaccgatgacgagcgcggggcgcagaccgttttcgatctcctcggcaatggcgaacagcgcggtgggcgcgttgccgaccgccaaaatcgcgtcggggtattcttttgcagccttgtgcatggcggcgacggcgcgcgtggtgccgctttcttttgcgctttgggcgactgcggggtctgccataaagcacagggcttccccattcagctttttgagacccggcttggaaacacctgcgagcgccatattcgtatcggtgatgaccgtggcgccgttatgcagcgcttctatggctttttgcacggcattttcggtaaaatgcagcgtttcggcgtactcgaaatccgccgtggtgtgaataacacgcttgacgacggcgagattttcccttggtatccggatatgcctctcttcaagctcttttgcgataatctgcatgctggtgcgctcaatatcggcgggcagatgatgctgcgggatcatgctttgcaccccctcgggttttccatgcccatggcgcggtacacggcatccatatcgaggctgttccgcacgccgtcggctaaaatgtcgagctgctcgcggcggtattcctccatggaaacaggcacggcggctgcagggtctatccccttgcgggcgcagaggtattccgcaagcttttcggtcagctcgccgctgtcaaagagaccgtgcagatacgtgccgaagacgttttgatttgtgcagccctcttttgtgccgtccgcatgcgtacagaacggctcaccgcggacgatcgtattgcctgtgtgaatttcgtaaccggtgagcatcgcccctgtaaacggcgcggcgatgacttcgcctgtgacctgcgcgcggtgcttttccgtacagaatgttgtttcaatcggcaataagttaaggccgcgcagcgtttgcgggcgaccgctttcggagccatccgggtcatgcaacgtctcaccgagcatctggtagccgccgcagacgccaagcaccggcgtctcttttgcggcgagctttaaaatgacggcttcgagtcccgactggcgcagccagaggagatcctcaaccgtgtttttcgtgccgggcaaaatcacaaggtcgggcgcgccgagctcgcgggtgttttgcacgtagcgcacatccattaaagggtgctgctcgagcaccatgaaatctgtgaaatttgagatgtgcggcaggcgaatgacggcgatgtccagcggacgcacggcgtcttttttttcaaggcgttcggaaagggagtcttcgtcctcgatatcgacgcgcagatacggcacgacgcccagaatgggcaggtgcgttttgtcttcgagcatggagaggccggggcggagaatttcgacgtcaccgcggaatttattgatgacaagtcccttgatgcggtcgcgctcgtccgtctccagcagctctacggtgccgaaaagctgcgcgaacacaccgccgcggtcgatgtcgccgacgagcagaacgggcgcatcgacaagctttgcgagtcccatgttcacgatgtcatccgctttcaggttgatctccgccgggctgcccgcgccctcgatgacgataacgtcaaaatcttctgcaaggctgttgtaggcgcgcagaatatcgggaatgagtgattttttcatcttgaaatactgtgaagccttcatctggccgcgcacttcgccgttcacgatgacctgacttccgacatcgctgctcggcttcaacaaaatggggttcatgcgcacgtccggctccactcccgccgcctgcgcctgtacgacctgtgcgcgacccatctctaagccgtcacgggtaacgaagctgttcagcgccatattttgacttttgaacggtgcggtgtgcagaccgtcctgcgcgaaaatgcggcacagcgccgcgcataataaacttttgcccgcgccgctcatcgtgccctgcaccatgatgcacttggcttttttattttcgctcatttcagcacctcccgcatgattttcagtagtttttcgttttcctccggcgtgcgcacggcggtgcggtaccaggtgttatcgagccccgggtagtttgcacagccgcgcacgacagcgcctttttcttttagtcgctcgccgaaatcttccgacgctttgaataacaggaaatttgcctgcccctccaagacgcgcaagccgagcgagcgcagggacgcgatcattctgggccgctcccgtgcgattaagcttcgcacgtggtcgacgtattcggtttcatctaacgccgcgacgcctgccgcctgtgcgagtgacgagactgcccacggctgccccgcttcgcgcatattttctaataatttttcatctccgctgagtacataaccgagccgcacgcccgccatggcgtataattttgtgaaagctttcagaataacaagctcggggaactgcactaaaaagcgctttgcagtccggctttcgtgctccgggagaaaatcgaggaaacactcgtcgatgacgggcgatgcatgacacgccctgcattttttcaggagtttttcgagaaaatccgacgtaacgatctgcccggtgggattgtttggttgacataagaacaccatatcgatggtttcatggagagcagagagcaactcttcggtaatttcaaaatcgttttcctcttttaaaaagaaatattcgacttcacagccgacggttttaagtgcggacgcgtactctgcgaaagtcggcgcgggcaataatgcgcggtgcggctttttcgcgagcacgagccgaaaaataaggtctgccgcgccgttgccgcaaagaatttggttttcgtgtacgttttcgcttgcggagagtttttggcgcagctctctgcaaagcgggtcgggatagcggtctgcggtaggcagtgcgtttacgattgccagtgcgacgccctccggcaaaccgagagggctgacattcgcggaaaaatcgagtgcatcgtggccgaatttggcgcggtagcccgcccagtcgccgccgtgtgtgagttccatattctatccccctttacagtaagacgaatgccgcgcggacgagcagaccgagcgcgagtgccaaaatgctttcggcgtacatcatgcggtcggctttcaaaatgtcctccggcatgaccgggcgcagcgggtcgccgatcgtcggcttatcatagtattcaccgaaataatatgcgggcccggcgagctgcacgccgagcgcaccggcgcaggcactttcggtctgcgcgctgttggggcttgcgtgatttcggcggtcgcgccgccagatcttccacgcgcccttgacgctgtttcccgtgagccccgccgcgagcacccacaaaagtgccgcgatacgactcggaatgtagtttgcggcatcgtcaagctttgcgggcatgcgcccgaaatttatgtacttttcatttttgtagccgagcatgctgtccatcgtgttgatggctttgtaggccagcgcaagcggtgcgccaccgatgagcatgcaaagaagcggcgcgatcacgccgtcactggcgttttcggcaacggtctccacagcggcttttgtcacgccctccatggaaagcgcgtcggtatcacgcccgacaatgcgggagacggccttgcgcgcggcggggagatcgttctttttgagttccttatagacgttgcagctctcctgcacaagtccctttgcggcaagtgactgcgcgcaccagaacatttgaatcaaaagtccgaacacccagtgaattttataaaagaagaagcacaccgcgccggaaagcaggaatgtgccgacaggcaggatgaatgcggtgattgcgccgccgatgcgctcgccacgcggtgtttttggcaaaattttccgcaagcttcgatctaaaaaggagataaccttgcccatatatacaaccgggtgcggcagccacagggggtcgccgaagattgcgtctaaaatgaatccgccgaggacggcgaagaaaatcagcatgtggcctcctttgtgtactgcacggtcccgatgagatgcaaaacgtgcttttcctgccaatcgcgggcatcgagcacatagccgccggcgttcggcgcacaccattcataataatttttatgcggtatggcgtacttttccatgacggccatctgcgtgccgccatgcgcaacgataacgagcatgtcttcactgttttgaatagattgatttagcagtgattcaaatgctttgcaaacacgctcgctgaaatccgctttgcactcgccgccgggacaggtgctttcgcagttagaatccacccatgcgcggtaggcggaatcgtgctccatctctttatagttacgtccctcaaatacgccgaaattcatctcgctgaggtcgtttacggggatatactcggcagtcggaaataaaatctccgctgtctgttttgtgcgctttaacggcgtgacataaacggttttgggcgaaaagtccgcctgcttcagcgccgcaagcccggccggtgagagtggaatgtccgtcacgccctgatagcggtgatcaacattataggcggtttcaccgtggcgcaaaaggtaaattttcatttgggcagttcccctttcaagacggtcggaatgccgcagaacatctgcacaacacaatcggcacgcgcggcgagcaggcatgccaagcggccggctttttcgcggtttgcgcgctctgtggcatcaacgggcacaacaccgccgccgacttccgttgcggtgataatatcgtatttttcagaaagtattttagcaagtgcttcgaggtcttccgtcgtttcggcctgcttctgcacctcaaaacagcatgtaccgccgagcttttgcgcgaatgtgcgcttgccgctgtaaagcggacctgtgatgaacagcattacaaaattcctccccactggcacacggcgagcgctgccaacatggcgagctctgccctttgcaggaaccacccggcaaggtcgcccgtgatgccgccgaattgctttttcgacactgcgtaataccgccaaaagacaagtaaaacagccaaaacggccgcccagccgccgagcacgagcatcgcagcaccgagcacgacagtataaataatcaagacgcggcgcaccgttatgcggtctgcggcttccgcgaacgtatgcgcgagaccggtgtttttcgccatgggaaatgatgccacggcgagaccggaaaacgcacgctccaaggtgagtgccaatatccaaaccacaccgaaacgcaccgtaaatttcaccgaagcacagagcgcaaaatacaatatgaaatatgtgcataatcggataactgcaaatgcaccgcagtgtgggtctttcaaaatttcgagcttcttttccgcatcaccgtagcttgagagcgcatcgcatgtgtcggcgaagccatccagatggatgccgccggtgacgagcacaggcacaaggcaaaagcctgctgcgcggacgagctccggcacaggcaggacgccgactaagcaccacaacccgccgcacactgcaccgatgagcggaaatgcgcacagcgcgtatcgcatgttcttttggcaccattcgaactgcggcataggaattgctgaaaacatagcgaacgccacagcaatcgtctgcaaaaccgtcataccctttcccctcctttgtaataaaccgggataccgcacactacgcggcagacgtgatccgcacgggcagcgatgccgttttggatctgcgccagcgctttgaggtacagatctgtttcgtcggcatactctgcaccgccgctgaatacctcgttgccgacgacaatcagacgttcgcattgtttatatagtatttcaacgccatacagaacggcttctgcggtatttacccccgcacctttcggatcgtacagctcgtttgcggtcaggttgccgaggtcttcgagcagaactattccgcgatttggtattctgattttatcaagactgataggtgattcaatcgtttcaaactgtttttcttttcgcatggcgcggtgcttttcgacgcgtttggcgcactcttcatcccatacctgcatggtggcgacgtagtaacgcggcagcgggagctttaaggtcaggctttctgcataggcgcttttgccgcttgctgcgccgccgatgacgagcgtcagcattgcggagtgtacggcgcgatgccgccctccgtgaacgaataacagttgtcgtagaccgcgagtgccatgtcccacagcggcaggcttgcgaccgcgccggtgccctcgccgaggtgcatattcgccgtaatgagcggctttttgccgagcgcttccaaaacgatacacgccgcgggctccgccgaaacgtggcttgcgaacatggccttagtcgccgttgggcacagccgtgctgtacaaagcgccgccacgctgctgatgaaaccgtcgataatgacagggatattctccagagcaccgcccaaaaacacgccgcacagcccggcgatatctaagccgccgagcgccgacagcacgccgatcacatcggttttttcgggatgattaaccgcaatgccttgatagatgacctcaatcttgcggcgcagaccgtcatcggagagccccgcgccgcggccggtcatttcttcgggcgcatggccgagcaaaacgcagctcacggcggcagatgttgtcgtgttgccgatgcccatttcgccggtcgcgaggagttttatgctctgcgctttctgctcgcggacaagctcgatgccggtctcgatggcttgtaaagcgtcctcacgggtcatagcaggtccgccggtgaaatcgtccgtacccgcacgcacacggcaattcttcacaccgtccacgggcgctcccgcgatgcccatatcaacgggaatcacaccgcagtgcaccgtttccgccattttgcagacgcttgttttgcgctgcgcaagattctgcaaaacggcgcgcgtcacgtcgctgccggactggctgatgccttgtgcgatgacgccgttatccgcgcacagcaccaagaccgcgcgctttgaaaaatcgaactgcggcacacctgtaagcgcagccacatcttctaataatggttcgagatcaccaagcccgccgagtggctttgcaagcgacgcccaatgcgcgtgggcagctttgcgcgcggcttcatccggctgcgtgattgttttgagccggtttttaagttctgtttccgtcatattttgtccctcatgtagcggcgggcggcgtccgcaaagcgctgcggcagcggcgtgcccgcccagtataaatgcggaaaacccgcataaaaatgttcgtttgcaaaagcacagtcccacgtacggccgttcggctttgtcgctgtgcacactatgccgttttcggtggaatcccagtggtgaaattcgtgcacaggaagcaactcgtctttttttagcagcatgttgttctccttcgcagtaagcgtcgcgtaaccgaagcgcacgaggtggccgaccttgaagccttcgccgggcagaacgcctgccatacggtatttgtcgccgtttacatcttcaagtgtttgacctaaatacaagaagccgccgcattctgccacagtcggcaaactgtttttgattgcggttttgatgcacaaaagcatctcggtattttcgctgagtgcctttgcgcaaagctccgggtaaccaccgggcagatacagcccgccgatattttgaggcaagcttttatcgtgcaatggactgaaaaagacaggttctgcgccggcttctttgaacgcttcaagcgtttcggtatatgtaaaacaaaaggcttcatcccttgcaacggcgatgcgcacattaggaatcggaaattcctctttcggtactttgggtgccggacacgcaaagacgctaaagagtttttcaaaatcgaccgtcttttccatcgtctcatgcaaaagtgtgatcttcttttgcagattttcaatctcaccggcggttttaagccccagatgacgactttcgatcgcagctttgggcattgggggcagatagccgataacaggtacacctgtctccttttcgagcatcggtgctaaaatacggtacaaattttctttacagtcattcagtataataccggcgatatggtgcagtgtgcggaaggacagtaagccgcgtatctgcgctgcaagggttaagcttgcacctttcggacgcaggacaagcaggacgggtagattcaacgtatcggccaaatgccacgcacttgcgatgtcgcttgtgccgccgagaccgtcatagtaccccatagcaccctcgcatatagcagcaccgtgattggctgcgcttttattgtataaattttgaactatttgcggatttgagaaaaataaatcaagattgtgactttcaacgccgagcacactgcggtgaaacatgggatcaatataatcgggcccggatttaaacgcacaggggttgaagccgcgggctttgagcgccgcaagcagcgcaatggtgacagtcgttttgccgctgccggagttcggcgcggcgatgagcatttgcagcatgtcattccctcacaatcaaaaaaacgggattattcgccttcatcaggtgcaaattaccgactgaactgctgcggtttatggcaatttgtgtgatttgcgcagtcatgccgtgggttgcaaaagatgaaagcgccgtttgcagcgtttcaagcgcgatagcggaaacacacaggcgagcactcgagtttgcggtcaatacagcatcgatgatctcgggcagattgcccttactgccgccgataaacacggcatccggtgcaggaagatccgttaatttttccggcgctttgccctcgacaagtgtcaaattatgtacatgaaatttgtctcgattttgttttatcagcgaacaggcggctgcgtcacactccacagcatacacgtatccgagcggcgcagcaagcgccatttctatgctgacactgccggtccccgcaccgatgtcccagagaatatcggtcggtttaacggcaagctttgcgagtgccgcggcgcgaacctcctgctttgtcatgggtgttttgccgcggatgaagacttcatccggcaaacccggcacacgccgcacaggcacttcacacgactctacaagaagcacacatagcggtgcaaaaacgctttcagatatttttcgtactgcattcttactgattttttgctgtggtgtaccgagattttcaccgacaaccgcctgcacgtctcccagcccggcttcggtgagtttcgcgcaaatcaccgcgggagtaacttcgccgcccgttaagaaaaatgtgggcttgcccatgctgcacgcagcaacagggtcacatgcacagccgtgcgcggagacgagattccagttctgccacggttcgtggatggcagcagaaagcaactgtacgctggaaacgcccggaatcacggtgtatccgatgtggcgttcatcgagcacgcggcacagtgcagaggcgccggaataaaacccggtgtcaccgctgtatacaagtgcgatattttgttcttttattgtttcaagcacggataaaatctcacagattttatacattgcaatacgattttgcgtacagaaatccggcaagttttcgagtaaacgctttgcgccgatgatgagtgtggcttcatgcaaaacttctgctccctgcattgttacgctgtcgaatgtgccgccccccatgccgactaaagtgattttcatagtaattctctacacctttcaaggatactttcaactgtctccccgttctccctcgggcggcgcagtacaaggaggcgtgcaccgcagtatgcgcaggcttttgctttttccataaagccgcctactgcgccgccgtcttttgtaacgagccattgaatgttgaattgttcaaggatcacgcggttgaggtcaagtgaaaacgggccttgcatggcgatgatgttgcggtgcggaatatcgagggcttcgcacgcgcgaatgccgtcgagcgtgggcaatacacgcgggaaaatccgctttatatctagatttttaaaagcgggcaactcctttgcaccggtcgtgagcaagatattcccggcagtactttcgagatattctgccgcttctgctgccgtttcaaacacgatactgttcttcggcaattcgctttcggtacggagcaatcgatggtactcaacgcctgtcgtttcacacgcttcacaaatggtgcgcgtggcttctgttgcataggggtgcgttgcgtccacacagattgacgcgccgtgcaaaagtttcgtcatctccgcggcagtgcatcttcctacatgaattgtaatattttcattctcgtcttgttcttctgcgccgatctctgttgcgacgctgacaagaacttctacgccgagatttgccaaaatttttgaaaactgcctgccctctgtcgttccgctgaacaccacagctttcataccgtgcgatacccccttggcgttaccattttgctttcgatattctttgttgctttgttgcctatatatacagtcgtgaacatatcgacctgcttgttttcaagttcgcggagtgttatgatctcactttgctgcctttctcttccaatgttgcgtacgatgccgcagacggtctcctccgatttgccgttttggagcaaaatacggacggcacgctgtaaataatcaggccggcctttcgaggacgggttgtagattgccacgcagaaatcgcccatggcggcgcaggcaaggcgcttttcaattatctcccatggggtgagtcggtcggaaagggaaattacgcaaaaatcatgcgcaagcggtgcgcctaaaaccgcaccgccgctgagcgccgccgtaagtcccggaatggcctcgatctcgacgctcggataattgggtgcaagttccaaaatcgggctcgccatgccgtatacgccggcatctcccgagcagacaagcgccacggttttgccgctttgcgcggtcttgagcgcccagcggcaacggtcaatctcctttgtcatgcccgttgcgtgcacctctttttcgggataaaacgagcggataagatcgatgtagacggtgtagccgcatagtacatcggcgttttcgagcgccgttttcgcctgtgcggtcaaaaactgcgggtcgccggggccgaggcccacgacataaacgagatttcgcttcattttacacgctccaatccggggtaaagggttttgcggcgacggcgaacgtcacgccgctgtatatatgctttttgatcaccaattcgccgcccgacgccagcacggccgcacgggcgcagacgttgtcaacgcccgttatctgctgcacaaatgaagatgatgtgaatttgccggacgcttttttgagctcctcggctgtataaaaatagatactaaaatcatggttttgacagaattccaaaagccccggttcatcttttttgaggtctatgctcgcacacgcacagatgctttgcggtgcacagcctgtttctttacaaaattgtttaaatgttgcttcgatatgttcagccgatgtgccgcgtttgcagccgacgccgagcacgcagatttttggaacgaggtgcaaggcatcgctctgcgggtggagtgttacggaaaaatcggcttgatggttctcgtctgccgagaaaacattttcaggttgagtgcctgtgattttccactgcgaatcataataaaccactttaccggcgagcagtgtgctgctgagggttttgatacgcccaggctcgagcacgtggcagttctgcgctttcgcccactcgtctacagcgaacacgccttcgacatcggtcgcggtcgtgatgaccggcactgcgccgcagatgctcgcgagtttcttggcaaggtcatttgcgccgccgaggtgaccggacaaaatcggaatggaaaaccgaccgcgctcatcgagcacaatcacagcgggatcggtcgccttacttttgcaatgcggcgcaatggcgcgcacggcgatgccgacagcgccgatgaagatgagcgcatcggatttttgaaagttttcggccgtccaattggataatttcacgccgtttttaccgccgcgactgatgctgcccggatgtgaaaaagccagactttctgcgagttttaggccggtttcagtgaaagcgatatatgcgcagctcatgctttgctgcctttccgatattccgtcgtgaatgtgggatcgtaaagcttactgcggtcgtattgtgtgccgagaaaatctccgacgacaataagcgccgttttggtaatgcccgctttatgcacgctttcggccaaatcatcgacagtacagcgcacaattttttcctccggccacgtagctttgtagacgactgccacaggagtggaagccgtataagccccctgcaaaagcgcctgctgcacctgattgaccaaaccgattgaaaggaaaatcaccatggtcgcgccgtgtgcagcgaggctttgcagcttttcgttttccggcacgggtgtgcggccttccatgcgcgtgatgatgaccgtttgactgacagacggcaacgtatattctgcgtttaaagctgccgccgcgccgcagaagctggagacaccgggggtgtcgtcatagggaatgctttctgcatcaagcctatccatctgctcgcggattgcgccgtaaaggcacgggtcacctgtgtgcagacgaactgttattctgttgtttttttcgttctcgcgcatgacggaaatcacatcttccagcgtcattttggcgctgttgtagatcgtgcaatctgctttagcgagccccaaaagtacagggttgacaaggctgccggcatagatgatgcagtcggcagtctgtaagagcgccgcgccgcgctgcgtgatgaggtccggcgcgcctgggccggcaccgacaaaatgtaccatgtttacgactccttccacttttgcagcaatttttctgcggtttcggtctgcccaagggggccggtttgattggaaaacagcaccgcgccgacttggaatgcacccgctgcgcggcgctcgaggtgcagctgcacagcatttatcaggccgtgcatgacgggctcgcgcagatcgttttgatccaaaatatcaaggcaggcatcggttgtggccgcctgcatcagcgcttcgcacacctcttttttcgcgcccgcaagcgccgcatacgtgcagaaaagctccgtgcgacagtccgccatgcgggagtgcgtgttcataataccgcccgcgaccttcacgagcttaccgatgtgcccgacgagtaaaacttcttcaaagtgctctgttgcggcggcatcgagcgcgtcaccgataaaattcgagcactttatgatgggaatatccaagagcgcggggtaagtttcacgcagataatcgaggccgtagttgccgggagtcagaatcaggcggcgcgcaccgtttttgagcgcagcctgatgaatttccagctgcatcgtatcgacgattgcctgctgactcatcggttccacgatgccgctggtgccgagcaccgaaagtccgccaatgacgccgatgtgtggattgaacgtctttttcgcggcctcttccccaccctcgatggagacaagcacggaaaagccgcctttatactcaaatgttttggcttcttttaagagggcttcggtaatcatctcgcgcggaacgcggttgatggccgccgcgccgacgggctggtcaagcccgggcttggtcacacggccaacacccttgccgccgtcgattttaacgacgccgtgttcattgggcaaaagcgtcacatttgcgctgacgggcaagccgtccgtggcgtcaatatcgtctcctccgtctttgcgaatggcgcatacggcgccggtgtcaaccttctcacagtagattggcgcgacctcaacaacgatgcctttcggtgtacgcagaccgaccgtttccggggccttgccggtaaaaagcagtcgcgccgcaccggcggcaccgagtgccgcgcatgtgcccgttgtgtagccgcagcgcaataatttttgtccgctgcgaatgtagtgctcaaactttggcgactcctttttgccgaacagaaatgtgtattcttcggcggacattttatatagcttttgtatgttctctttttgaaacgcgtcttttacggtcatgatgtccgagacactgttcggcgaaacgcagacaacggcatcggagagcttctgcgcgaggtcaagctcgtgcaggctcaggataattgcagtattcttctcttttgcaagccgacgcagaatcgtcatgagctccgctttacctttaacgtcgagaaatgaagtcggttcgtccaaaaacagaatttccggctcctgacagaccgcccgtgccaaaaggacacgctggcgctgaccgtcactaatcttatcaaaatcgcggtcggcaatatcggctgcatttacaagatgcagcgcgtcgaaaacctgctttttatcttcttcggagaggattccgagacgaccggtatacgggtaacgcccggctgcggcgacatcaaagcaggtcgtgagctctgtgcggtttgtgtgcggcaccatcagcgccattttgcgcgcgcgggcattcggtgagtataccgaaagggactgcccatcgagcaaaacggtccctccctgcggcgcaagctgcgcggcaagcgttttcatcagggtcgatttacccgcgccgttcgggccgataagcgtcaaaatttgtccgcgctcggcggcgaattttatatgctccaaaagcggagaattgtagccgaccgcaaggtcgttcgcttcacaatagctcatgctgccgcctcccttctctgcttgcgcacaagcagcaaaatgaccaccggtgcgccgaaaatcgccgtgacggagctgacggaaagctccgtcggcgcaaatatactgcgcgcgatgaggtcacacaaaaggcaaaatgctgcaccgcctaaaacgcaccccggcagcacatgcaaaggctttgcactgcggagtgtgcgctttacgagatgcggcaccgcgatgccgacaaaggagatcggccccgcaaatgccgtgacgcatgccgcgagcaggctggataacaacacaagtgcgactgagaacggacgcacggaaacgccgacactctgcgcataggcttcacccatttggtacgccgccatcggtttggaaaacataaacgaaagcgcaaggcatggcaacacaattaaagccgccgtgaggacattctcccacgtcatgccggagaagctgcccatcgaccagttgtgtagattcacgatgttggaatcctgcgcaaatgcaacaacaacgtccgtgacagccgaacagatatagctaatcatcacgccacaaataacaagcacgcctgcgcgctttacgcgctgtgaaacggccaagacgaagcccatagcgaccatggcaccgacaaatgacgctaaaatcagcgtgagtgagcttgtgaacaagccgtgatttaaaagcacgaccatcgtgagtgcaacggcaagctttgcgccgccggaaacacccataacgaacggcccggcgatagggtttgcaaaaaaagtctgcaataagtaacccgcaacggacagcgccgcaccgagcaaaacgaccatggcggcgcgcggcaggcgtaaaccaaatatgatcttttgcgcgagtgcgttattccccgcgctgaaaagcgtgcttaaaatgtccttcggcgaaagggccgtgctgccgcagaaaatgttcagcataaacagcgcgagcaatgcagccgtgagcgcaagatatgaaattgtcagacgctttgtgccgttttgtttcatggtttcctcagcttacatgtgtcagaaatttcagttcatcttcgttgaccgcattcgggctttccgccgtgaacacgcggttcatgtccaaaatcaaatcgggcagctccatgctttcctgaaacaggctttgcgtggtacaccagacgttgccgttctgcacggctttgaaatctgccagcatgggacattttgataagagctgctcggttgtttcaatcttgccctcgatggtgctattgtagattaaaacatctgcatctttcgcgccggcgtagaactcctcgagcgaaagattgattgttgcgaggttgttgccgttatcggaaagatcggagaaaacgtattcgccgcccgccatgccaatcatcttcgcaacgtaatcgttcgatttacgcaccgtgacgaggttattcgacgtcacagagaaaaacgctgccgttttgcctgtggtatcctgccccaaaagcggccggatgcgctgaacctgctcgttgaagaacgtttcggcttctgcctctttatcaaataaaatgccatagagcttcacccactccatgcgtgccaaggggtcggattcatagctggagcgctcaacaagcacgggaatgccaaacttttcaagctgctctttcacttccggcgtgtggtagatcattgtgttttcaatcgcgaggccgcagtttgcagacacgatgcgctcgtaatctggcgcgctgtacttacccgcgtaggaaatttcaccgttttccatggcttctttcgcttccggcagataccagttttcggcactcgtgccggaaagcgtgacggcgcttcgtgcatcgagcttcaggatcgggtccatcgcagacgtggagacgagatagacattttcaagcggtttctgcaaaacggtgatgtcttccgaaagaccgttcggcacggtactgttttccggcacaacgaggtagcgggcattctgaatggtgatgagccttgtaccgccggtgcactcgtccacggtgaactctttcgcgtattcgagcggataggcgctttcgacttgaaaatctgcttgcgtttcatcggcctgcgctgggcttgatgtactctcaggctgtgccgggtttgctgcgcagcccgtgaaagccagaagcaaaagcgccgctaaaagcgctgtaagccgtctcatgcggtaagagacgcgctgtcaaacgtcagggtgtattcgatctcgtgcggagtgctcatagcggtggtatctgccgtaacggcaagtgcggtatcgagtgcggcgacgggaatttcaaacacggagttgccttcggtattgacgggcagatacttttcgccgtccacgatcatgtaatcgtagtttgggctgctccatgtgatctccgcggtcattttgccgtccgcaacggtgagctccgtggggctctcgattgttgcacggccggaaccgccctcaagcgtgacgttgcacgtatacgtgccgtcctccggcacttcggtctctgcgtcgcttgcggtgtcctcaacgatcggctgtgggtcacgcacgctgaccttgtggtcgtaccacgtgcccttcgtgccgatgagcgcaaggtcaaaatctttatcgacacttttcagcgggatgtcaaagccgtagacttcttccgatgtgccgtctttataggtgacggtatcggtggtcggctgaagccattcgctttcgttctgctttgcgtcctctgccgtaccgaggtacagatttaagatcttcttagaacgcaggctgacgtggaacgtcatctcgccgttttcaactgtcagcgtacccatgccctcgcaagtttcgttcgcctgaaacatagagctgtccgttttgaactctgccgtgtacacgccgtcttccggcacaacgtccggctcttcggtgggggtgggctctgcgcttgaaacggaagtttcggaagacgcactgctttcattcgtattgcctgcgcacgcgctgcacccgaagatcaggagcgctgagagcaaaagggctgtaatctgcttctttttcattttgttatacctcttcaaacataagcgataagcgcccgaagagcgattctctccgggcgctgtgtttacggattagccattcagggaatcgatcgctgcctgcgcgtggtcgatgtagatctgctgaacatccccaatctcaccgagacccgcaatctgcgtatcaacgctgtcgaagcagtccgcagccttgaactggctcaaccaggaatcctcatcgtcgccagccatatcgttgttggcatggtcacctgcaacgaccatcagcggacggagcacaaccttcgtaaagcctgcttcctttaccttttcgataacagcttcgcaggaggtgtcttccggctcaccctcaacggtgccgatgaatacgttcgtgtagccgagtgtttccatggtggtctgcatctggctgtaactgacctttgcaacatgcgccgtaccgtggcccataaagacgaatgcggtgccgtcttctgcagcggcagcgacatcatcataaccggcggttttcacagcttcagctgtgatggcctttgcaacagcttccttatccgcgttgataaccgttgcgtcgtcgcccacttcgccgagcagcggctctgcaacagcgatgccctcaaatttatccttatactggtcaagcaactcgttcatctcgtcgtactctgcgccgtgcatgagatgcgtcggctgcacaacgaggttcttgacaccgtttgcaacagcgcgatcaagcgcctgctgcatgttatcgatcttctcatcatcacgcgcctgcacgtggttgatgatgatctgagcggtgaacgcgcggcggacagaccaatccgggtaggcttcctgcagagcgtcctcaatacccttgatatcctttacgcgactgtcgttgaaggacgtaccgaagctgacaacgagcagctcgttttcgccgatttcgtcttcgttgcgcggatcgtcttttgcagcgtcgcccgtatcgcggccgaagtaatccgggtcggcgttatcgccttccacaagctccttctgcgcatcggtcagcgcgtcccaagcttcttttgctgctttgcattcttcatcggtattgtcattgcgctcctgcacatagattgcatcgatgagatccgcaacattcttcgctgccatttcgtctgtttcctcctcggttgcgctcgccgcgctgctttcaactgtggaagaagtgctgctctcctcagaagatgcgctcgaagacgcgttattgccgcagcctgcggcagcggtcgtgagcattgtaactgccattaccagtgcggcggtctttttccatgtaagcttactcatgggttgtgcttcctttccgtggccaatatcggcccttatcgtattttcgctgaaagaaaggtacaggaaaccaaggcatatctgaattctcttcaaatacaccgtatgcccatgagaaaagccgaggtcctttgtgctgctgtaacgtacaaaatatatagaacggcaacacaaaaagaccccggcgtatagtcagagcattttcggtacaaccaattcctcgtgatttggagtgtgacactcccgtaccaacacacaggcaggtttcccggctgaaagatcgtcatctgccgccgccttcccaagcgatgctcagtgaccggcaaaacgccatggcggcaaactcccttatcacggtgacgagatcgtgcgggatttgcacccgcttcccttttacccttttctatgcgcttttaaaagcacacgaaaggcacctgttgttttcattcagttttcgcagtacagtatagcacaggaaatgcaaaaaagcaagaaaatccgatgctttttgccttgcacacaaatttgcccgaaacttcagtaaaacatcttgctattttatgcgaaacgtgtataatatacctaaaaatggatgcgtgaattgccgagtggcggcgatttactttcatcaaggaggaattcaatttggtcaaagttgcaatgatcggcgtcggcgccatcagcggcatttaccttaaaaacatcacgaacgtatttaaagaggtggagctcgtcggcgtatgcgacctcatcccggagcgcgcggaaaaaggcgtgcagacggtgaaggaatacattgaagcaggcgcaaaagcccccgtgccgaaaatttataaggatatgtatgaagcgttcaacgatcccgaagtggaggttattctgaaccttacccgtccgtatgagcactatggcgtgacgaaagccgcgctggaacacggcaagcatgtgttctccgaaaagccgcttgcggcggacatggaagaaggcgacgagcttgtcgccctcgctgaagaaaagggccttttgatgggcggcgcgccggatacgttcatgggcgcaggcattcagaccgtgcgcaagcttgtcgatgacgggtacatcggcgacattgttgcggcgaactgcgcgatgatctgccatggccacgagacatggcacccggacccggagttctattataagcgcgcaggcggcccgatgatggacatgggcccgtattacgtgacggcgctcgtgcagctcatcggcgaagcgaagggcgtcatcggcatgacgaaaaagacgttcccggagcgcatcatcacgtccgagccgcactacggcgagaaaatcgacgtcgatatcgacacgcatctgacgggcagcattgcgtttgcaaacggcgcggtggcgcagatctgcacgacatttgatgtgcattacgcacccggcgcacagtgccgctttgagctgtacggcacaaagggcaccatctgtgtgccggacccaaacacgttcggcggaccggtgctcgtataccgcccggaggatcaggtaagcgggcaggcgatcgaccccggtctgatggcgcacaacgcgccgcagtattataccggctacaaagaagtgccgctgctgttcgactacaacgaaaactcccgtgcactgggcctcagcgatatgtgcaaggcgctgcgcaccggccgcgatttccgcgcgaactaccaacagcagcaccacgtgctggagatcttgacgagttttgaaaaatccagtcgcgagggcagatatatcccgctgaaaacacactacacgcgcacggcaccgatgcagaacaacccgatgcacggcattttagacgactgacatggaggcaatacgattatgaaagcagcatatacaggttggacttggctgaccgccaaggacgctgagaccgccaaaaagcaattggagcagtcttttaaggaatgcaagttcctcggctatgactatgtggaaaacttcgcctttatcggcgattattttgaagacccgaacgagctcatcgagatggaaaagcgctgcggcgtggagcttgtgaacctgtacggtcactttggcaccgacgtggaagaaaacatcaaggtcggcaaaaagcagatcgattttctcgcagccatcggcggcaagtggtacaactgccagcacggcgggtatttcggtgacggcggtccgctggagcgcccgacaaaccccgaggtgctcgataaaatctgtgccattgcggacacgctcggcgcttacgcaaaggaaaagggcgtgacactgtgcttccacccgcactacggcacatgcgtgttctgggaaagcgacattgattatttgatggcacacaccgatccgcgttatgtttcgttctgcatcgatacggcacacacaacgcttgcgggtatgtcccccgtcgaactcatcaagaaggtcggcccgcgccttgcgtacatgcacctcaaagacgtagacacctacgctttgaaaaccgcagagggtgcagacaaaatgggcacattccgcgcgctcggccacggcaccatcgacttccctgctgtgaaagcaacgcttgaggagatcggctacgacggcattttgtgcgtggaactcgactgcccggaggtcggcaacttccattcggcagaggtctccagaatttacattcgagacgtgctggatatttaagtttatttaggagtgaattttatggcaaacacaaatcccgtaaaggttgcaatgatcggcgtcggtgccatcagcggcatttaccttaaaaatatcacgaacgtatttaaagaggtggagctcgtcggcgtatgcgacctcatcccggagcgcgcggaaaaaggcgtgcagacggtgaaggaatacattgaagcaggcgcaaaagcccccgtgccgaaaatttataaggatatgtatgaagcgttcaacgatcccgaagtggaggttgtcctgaaccttacccgcccgtatgagcactatggcgtgacgaaagccgcgctggagcacggcaagcatgtgttctccgaaaagccgcttgcggcggacatggaggaaggcacaaagctgatggcgctcgcaaaggagaaaaatctcctcatgggtggcgcaccggatacgttcatgggcgcaggcatccagaccgcacgcaaggttattgatgacgggctgatcggcgatgtcatcggtgcaacatgcgcaatgattcagcacggccccgagacatggcacccggacccggatttcctctataaaagaggcggcggtccgatgatggacatgggcccgtattacgtgacggcgctcgtgcagctcatcggcgaggcagtcggtgtaacggctgtgacgaaaaagtcgtttaaagagcgtctgatcacctctgagccgcactacggccaaaagatcgacgtggaggccgatacgtacctcaccggcaacatcacgttcgcgaacggcgccattgcgcaggtgttcacgacgtttgacgtgtactatccctcgcagaactacgcacgctttgaaatttacggcacgaagggcacgatgatcgtgccggatccgaacacgttcggcggcccggtacttttgatgcgccccgaagacgtggaagcaacgcactccgatcccggtctgcgcacaggcaatctgcccgcttacgccggctacaaggagattcctctgctgttcgactacaacgtgaactcccgtgcgctgggcctcagcgatatgtgcaaggcgctgcgtaccggccgcgatttccgcgcgaattgccagcagcagtatcatgtgctggagattttgacgagctttgaaaaatccagtcgcgagggcaagttcatcccgctgacgacgcattacacgcgcaccgcgccgatgaaaaacaacccgatgcacggcattttggacgactaaaatcgcataaaagcacagcccgcagcttggattttcctgctgcgggctgtttgctgcttattcatagtgttttcagctcgtctgaaaattgccgaaaggcggtaggcagtgcgaaatcgcgctcaagttccgcaagacttgtccatgtaaacgcttcggacatcgcgttgcaacgtatcacatagccggtcatctcccagcgaatatgtgtgaaaatgtgcgtcttgtgcgtttcgagcatcagctccttcgggtcggtgtgaaagctctgtgctgtttgcacggcggtttgggcatcgagcttttgaggtacgttcgggaactgccataacccggcgagcaaacccgtctcgcttcgcttttccacggcgaatctgccattgcattcgagcaaaagcacggtgcgctcttctgttttctttgcggctttcggacgttttacggggtattttgtgacgtttccggctttatacgcacggcaaaagctctgcgtggggcagacttcgcacttggggcttttcggcgtacagacacacgcgccgagctccatgagcgcctgtgtgaacgcgccgcagtgccctttcgggtagaccttgcaaagcgcctcccctatctctttttttacctgcggcaggtcgatcgggcggccgtccgccgtcatgcgcatgattatgcgcagcacgttgccatccacagccgccgcaggctgctcaaagcaaatggacgccactgcgcctgccgtatacgcgccgatgcccggcagcttttcgagcgcttcggcggtatcgggaaaagcgccgttttgcgtttcggtgaggagctttgccgttttctgcaaatttcgtgcgcgggagtaatagccgagtccttcccagagctttaacacgcgggcttcgtcggcttctgcaagtgcctgtaccgtagggaacgcttccataaagcgctcgtaatacccgatgacggcttccacacgcgtttgctggagcatgatctccgaaacccacacgcggtacggctccttcgtgtgccgccaaggcaggtcacgcgcgtttttctcgtaccacggcagcaaaactcccggcagcgcagcgtaaatttcgttttgttccatactatcccctttttccactcttttgatcttgggtttacagtatagcacacccgctctaaaaaaggaagcggtattgcatggaaacggcagatgcggtataatcggtattatcttgactttcccgtttaagttttgtatactttacaaagcatactgaatttataggcgatataaagacaaacgctaaggagacaaacgctaaggagcgaagaaatatgttgaaccaattttccagaacggagctgatctatggccgtgacgccatggagatgctgaaggatgcgcgcgtagccgttttcggcatcggcggcgtgggcggctacacggtagaggcgcttgcacgcagcggtgtgggctcgctcgacctcatcgacgacgacaaggtctgcctgacaaacatcaaccgccaaatctacgcgacgcgcaagacggtcggtcagtacaaggtggatgttgcggccgagcgcattaaagacatcaacccggacgccgtggtgcgcacatacaagactttctacacgcccgaaacggccgaccagtttgattttaaacactacgattatattgtggacgccattgacacggtgacaggcaagattgcgcttgtgatgaacgcaaaagcggcgaaaacgccaatcatctgctccatgggtgctggcaacaaggtagacccgaccgcgtttgaagtgacagacctatacaagacctccgtttgtccgctggcaaaggttatgcgcaacgagctgaagaagcgcggcgtgcgcaagctgaaagtggtttactccaaagagctgcccatcacgcccgtggacgacatggccataagctgccgcacgcactgcatctgcccgccgggcaccgagagaaagtgcacgcagcgccgtcaggtgccgggcagcaacgcttttgtgccgtccgttgtgggactcatcatcgcgggcgaagtcatcaaagatctgaccggcttcaaaggccgcggcatcggcgcataatctacttggattacgccgcaaatgcgcctgctccgtggagaacactcctcccgcgcggtgtatgccgcgagccgcgaccgtaaaaatacgctgaactcttggcgcatccgtttaagccatccgatgaccgaggataaactcgatgaagttgagaggatcttcgacaagctatatttggagtttacataaaatggaaagagaacttgaaccctaccagcgcgttgagcgcagtatacaaaagaaattccgcaagtcaatctgggtgccgttcatcgctgcggtaaagcgttacgagctcattcaggaaaacgacaagattgcggtgtgcatctccggcggcaaggattctatgctgatggcaaagcttttgcaggagttgcaaaaatacagcgaagtgccgtttgagcttgtgtaccttgtgatggacccgggctacaatgagctgaaccgtaagaaaatcgaaagcaatgcagcattactgcacattccgatcacgatttttgagaccgatattttttccgtggcaaacaacaccgaaaagaacccgtgctatttgtgtgcaaaaatgcgccgcggacatttatacagcaaagcgaagtcgctcggctgcaacaagatcgcacttggacatcatttcagtgacgttgtggaaaccactgtgatgagcatgttttacggtgcgcaattacaggcgatgccaccaaagctgcacagccagaattttgaaggtatggagctcattcgccccatgtattgcatccacgaagacgacattttatcatggaaaagatacaatgatttggagtttatccagtgtgcatgccgctttacggaaagctgcgcaatgtgtgaccatgacgtaagcgtctctaagcggcaggaaacaaagcttttattgcgccgcttaaaacgcgataatccgaatatagaaaagagtattttcaacagcatccattccgtttgtctcgacacgatggtcggatataaatcacgcggtgtgacgcacacgttcaccgagatctacaacacccgcacggaagaactgaaagaaaaatcaatagaagacgaataatgcaaagggcgaacagcggaaatctccggctgctcgcctttcgttacagcaaaaagttagatcctgctaactctcaagaagttttatttactttatgtagttgacagtgcgttttagttgtgctatcctctattttagttgaacatacaactaaacgtttttatctgaaacggaggcacagctctatggacaacacagagcgcaagataaccaagatcgcccgtgaagcaaatcggtttacggtgcagacgatgaaagaagacggcataggcacagcggaaatggatgtgatccactttgtacggcataaccccggtacaacacaaaaagaaatgtgggaagcgctgaagatcgacaagggcgcaacggcgcgtcgcgtggcgcggctggaggaaaagggctacctcacccgcgagccgaatcctctggacggcagaagtcagctgctctaccccactgaaaaagccgaagcgctccgcaactccaaggcggaaattgagggttcgttttacgagtggctgctcgacggcctgcctgacgacgaaaaagaggtgttctgcaaaacactgaacaccctctatttaaaatccaaggaagaacgccgcgcaggttttctgcatgtcgcgcagcgcgtaaaagagaaagaggcacaaaatgaagacaaataagaagtctgcggagtttcaaccgaaccgtgtcctctcttactttaaggcagagtggagagcactgctgattgtcacagtctccggcctgatctacaatatcggtcttttgaccgggccgtggtttgagggcacgatgaccgggtaccttgtagagattttaaacggcaccggacagttttccggcatgctgatgctcgtcatccgctttgcggtcgtcacggcggtcgtgcagatctcacgctacgtgaagcgcttttacgtacgccgctttgcaaacaatgtgaatcggcgcatgaaagaaactttgtacggcagccttgtgaaaaaaagccgtgcaagtttgcgcgaagaaggcgaaggcaatatcatgacgaaggccattcttgacgtagacgactgcgtggagggcatgcgcaaattcacgaccgagattttcgacaccggcgtggcgctgacagcatacctctgcatgctgctgtggtatgattggcgtttgactattttgtgcatgcttttcccgccgatctcgtatgttacagcggaaaagatgaaaaaagtcattcaaaaagccggcgcggcgtacaaggagcaatccggccggctgagcaccgccactctggaccgtgcagaaaatgccatgacctatcgcgttttcggtcttgaaaaaaagcgtcaggccgtatacgaagaaaacctgacgagctatgaaaaagcagccgtgaaagcgaacatctggaacgctgccatgccgccgatctaccgcatcatctctatggcgggcgtgttctttattttgtatttcggccagaagaatgtgcttggtaccggctggcaagcatggagtattgcttcgtttacaacgttccttgtatgctttgtaaagctttccgtaaaatcctccagcgccgcaaagctctttaacgcggtgcacaaggcgcaggtctcttggaaccgcatcaagcccctgctaccgcaggaagaggaaaacgagaccgatgaagtcaaagtaaagaaaacgcccgttgaggcgctcaaggtcaagcacctgagctttacatacccggacggcaagaaaattctcgacgatatttcgttctcggcgaaaaagggccagatcatcggcatcaccggcgcagtcgcatgcggcaaatcaacgctcggcaaggcgtttttgtgcgaatatccgtacgaaggccacatcacggtggatggcgcggagctgcaaaacatggagcaaagcgtgcgcacgggcatcatcggctaccttggacacgacccggagctctttaacgacagcgtggaaaacaacgttctgctcggcgacagcaaaaacagcgatacgtatttaaactctgcgtgcatgaagcaggaggtcgcggaaatgaccgacggcaaaaatacgctcatcggcagcggcggcgcgtacctttccggcggtcaggcaaagcgccttgcgtttgcccgcacgctgtgccacgataagccgatcctcattctggacgatccgttctccgcgctcgataagaacacggaaaagcaggcgttcgtcaatttgcaagcgctcgcaaaagacagcatcgtgcttttgatttcgcacaggttatacctcttcccggagatggacggcgtgatctggatggaaaacggcaaggccgtgaccggcacacacgaagagctgctgaaaaccgtccccgaatacgaaaatctgtatacatcgcaagtccataccacagataacggaggtgccgaacatgacgcgcaaaaaacaagtgagaacggtgatctttgacaccgtaaaaaagcaaaaaggcctttccctcggcattgtttcggccgttatcggcgctgttgtgttcgcacttatcccgccgctgatcttagccgatattgtggactccatcacagccggaaccgacgccgcattcgcacgtatcctactgtatttcgccatgctggcgctcaccgggttcacagaatccgcgcgtgaaagtctgctcgtggtattcggccagaaaatcacccacgcgctacgcagcagcttaatggacaaatttacacaccttaccgccgacaacatgacaaaacaggagcccggcacgctcgtttcccgctttgtcggcgatgtcgataccgttgaaaccctattctcctccggcatcatcagtatgttcgccgatgcgtgcagaatcatcagtattctggtcgttatctggttccgaaactgcggtctggcaatcgtattgctcgttttgctgccgttcctgttctgcttcacgcgccacgtacagaaaaatatactggcagcgcagatcgaaaaccgcaaggctgtgggccgcgcttcgggccacgtgccggaaacactgcacaacatccgcaccattcactgcctcggcaaagagaagtacatggaaaagcgctatgacacgtacatcaatgagagctaccgcgctatggaaaagacgaacttctatgatgccgtctactcccccgttatcctcattacgaacgcggtggtcgtcgccgtcgtcatgctgctttccgcttccggcaacaccaccgtgctgacgttgttcggtatgtccgccggtacggccgttgccgttatcaactatatttcgcagatcttcacaccggttgaaagccttggcatggagattcagaccatccagtccgcgttggcgggcatccaccgcatcaacgaattcttcgcgctggaagaaaatcccgataccgtaccgacacatgagccgaagaccatcaccgcaagaagcggaaacgtgccgtttgtcgagttccgcgatgtcacgttcggctacgataagcgcgtggtactggatcacttgagctttaaagtcatggccggcgatcaggtcacgctgaccggccgcaccggcgccggcaaaagtaccatcttcaagcttcttctcggtctttataagccgcagagcggcgaggtgctcattcacggcgtgccggcggccgatatccgcgatgatgaacgccgccgtctgttcggctgcgtggagcagacgttccacatggtgccgggcaccgtacgcgaccagatcacgctatatgacagcacaatcagcgacgaagccgtgcacactgcggcggagctcaccgggctcaaggatacgattgaaagcatggaaaaaggctacgacacgcgttgtaccgatgatctgttctcgcagggtcaatggcagcttttgtccatcgcaagagccgcagcagccgcaccgagcatgctgctgttcgatgagatcaccgcaaaccttgacgccgagaccgaacgcgccgtgctttccgctttgaaacgcgtagcggaaaaccgcaccgtcatttccatctcgcacagaacttctgccgaacttggtcgcatcatcgctctgacagattaaacacaacacacaaaaggcgaaccgctctttaccagaacggctcgctttttaatttacataaatttattcagtttgcataattcaattttgtgcttggctggattactgggatcaatgcgctgttatgtatatacttattcaacggaatacaatccgcatacgagagcgtttcgttccacgggtcaaactcaaaaagcagcaagctgttcgctttatccgtacttgtgtatgcgactgaaaagtaaatttttgagttcaccacaatgaccttatcaaattgcagctgcgtaatcggactccacagatagttcgttgcgcccactgcttcattcactgctttttctttctcaagctccgcggataattcttcttgatagatctcatacagctgctttgcgtattcgttattcagctcgtccaatccgaagctccaacgccggtcggttttataattgccgagcgataatgtctcgccgttgtcgcgtacctctgcccacacgtcgttttcgtagaggtgatattcgtccatgcgcacagcccgcacctcgtcgatcatcatgttatactcgaacacatggtcataatccgccagcgcaagctttcggtcgatccagaaaaagccgagatagtggatatccgggatttccatgcaggtgttcgggatttggttcaacgaatcagaagctctataatcatattttttaaggccgggtaaattgatcagtgaagcagaaagcagcagtttacggtcttctctttcgggataagtttccgaaaccacggaacaacgccaagtagctgtagaaccctttgttacacccgtttgataccccgaatttaccgttgtggtcatgacagtcgaactcggcgcaacatagtaaatttggccattgtatatcgccgcgatctcggattcccatacaagatcatttttgccgcagctgagctgctgcacttcgcctttgcgtttcagatagatgccctcgtccacaacggcaaccggcgcgctcacctgccgctcccagtctttgaattcgtcgtacagcttcatgttgtttttgcccgtttcaccgatgaacccgattttcgatttaaataatcccgctgtgactgttgcaccgcaaccggaaagcaaaagcaccactgttaaaacaccggaaagaagccgtttgtaagctttcattctctccccctccaaagcaatccaatttacataacattttataatcatattcttttatattcgtacatggaacatcactgtttcgtatcttatgacccaatcataccatgccgctcgcgaaatgtccactttttttaattttgagtaaatttttctatgcgaaaatcatacaaaactgattaaagctgattataccgcttaaaaccgcccatactcctgtttgcaagcgccgcaaaaattgcaaattgtggaggtgcttttatgtatgcgtatgcgcagagcaaagtggagatttgcggagtgaacacggcaaagctgcaaaccctgaaaaatgacgagatgcgcgagcttttagaccgcagccatcacggcgataaagatgcgcgcgataagctgatctgcggcaatttacgtttggtgctcagcgtcatccagcgctttacaagccgcggcgaaaacccggatgacctctttcaggtgggctgcatcgggctcatcaaggccatcgataatttcgacccaagccacgaggtaatgttctccacctacggcgtgccgatgatctccggcgaagtgaaacgctttctgcgcgacaacaatgccgtgcgcgtcagccgttccatgcgcgacacggcgtaccgcgccatgcagatcaaagagcagctgacgaacgagaacggcaaagagccgaacatcacggaaatcgcaaagcgcatggagttgccgcccgaagacatcgtcatcgcactcgaatccatcgtggagccggtgtcgctttacgagccggtgttttccgacggcggcgacaccatttatattatggatcaggtgaaaggcggcacgacggacggcgactggctggaggaaattgccatgcgcgaggcgattcgcgatctgaccgaccgcgagcgaaaaattctttccatgcggttcatcgacggcaaaacacagaccgaagtcgccggggagattggcatctcgcaggcacaggtctcacgcttggaaaaaggcgcgatgagccgcattaaagcagagctgtgagccagaacggcaagggaattcccctgccgcgtacataaaaacgcaggcttatgaaaagtctgcgttttatctgttctaattcaagttttgtagcggttcggataaaatttcgcgaagtttttgctctgtctcagctgttttggggcaggagccttgcgatgtcacggggctgccaccgccttttgcgccgagcaaagcgttgattttctgtgcggcggcgcggcagtcgagcgcgccgtttttgccgcgcgcgcaaatatagcgcaaacggtcactttcattgcagaacagcgcagcagagaaattatcgtccgcgcaaagcgtttcggcaatcgttttgcatgcgtcaaaatcgaccggcaggtatgccgaaatgaaattctcctgtgcttcggcatgcagcttttcgctgtacaattttgcaagctgcgcatttttctcgcggagcttctggttcaggccctgcacctgttcttccttgcgagcgagcgcgtcgaacacgccgtccggctttacggaaagcgcagcggcggtgcggcgcagctcggcgttttcttttgtgaagtgctccagcgccagcacgccgcaggcgaacgtgatgcggcagccggatttataccgcgcatgctctaaaactttgattaggccgaccggtgcggtgctcatgaagtgcgtgccacaacaggtgcacatttcggtgtgatcaccgtcttccacctccacgatgcgtacctcgccgtgcagcttctcatttttcttgcgcagcggcagattcggaagctcggaagcgtccacattaaaaatacgcacgggcgcgtttttccaaacgaattcatttgcgtatttttcgccggcctcgatctcctcatccgataaatcgtggtcaaggtcgatggtcacgacgtctcccgccatgtgaaagccgacgttttctgcgccgaacagcacgtcataggcatgcgaaagcaggtgttcgcccgtgtgctgctgggtgtattttaaacgctttgcggcatccactttgagcgtgacgatttcgcccaccgcaaacggctttcctgtgcggtgcagcaccgtgccgttcgcttcaaagcagtgtgtgaccggcacaaagccctgcatagggtcgtaaaccgtaccgatgtcgctcagctgcccgccgccttccggaaaaaacggtgtgcggtcagtctcaaggtcatagccgtcgtttttgttcggcgtacagctcacaacacgcgcggtgcattcgagcatctccggcgcggtgagatacaatttttcgcagctcatttatgtactccttttgtaaaacgaggtgccgccgcagccgcaccccgcctattctatgtttaattcagtttaattcaaaatgttccgcaagcttttgaagcacttcttcgcgcgtatcgcgctctgtgttttcccgtatcagcgtgaaaaatccgctgtgcagataagcttcatacacctccgggctgttcaccgacgcaatacacgctttgaaattttcaagcgccgcttccgggttcgagcacttttcgatctctttcagcaaaaactgcttttccggatcgccgcggttgaaaaacgatgcaacagacatactttgcggtgagagcatcaccgccacgtggttcggctctgcgattttatacaaggtatcaagcgggatattggtatcgactatgacttttctgtcgcccgaaagtcgaatcagctcggcgacttcaaattccgctacttcttccgagacgccgttataccaatcataaaattccttcggcgtgcgggaaacgtagtgctgccaactcggcatcgtgttgaaataattcaagtttggctgattctgctcgtcaacggcggacaagatcgtgtccatgttgtaattttcttcgcagtgcagcatgttgtacttttttgataacatgctgcacatggtcgattttccggcatatgccgtgccggtgataaaatagcagtttttaagatagaattttaaaatattatcttgaattttcatgtatatagctcctttttgacataacaaacttagggtctcttgacccaatttcaaacgactgatttctcagcggatgcggttgttgttatacaaaaagctgcaatacataaagtgttctcctttgctaaagctgaacttcgcttcggtgttttcagtatagcatagaaaactctaaaaggctaccgaaaaatgaaaaaatgcgccggacgcccgacgcatcttgaattttcagcttatctgccgcagcacttcttgtactttttgccgctgccgcaggggcacggatcgttgcggccgaccttcggaccctttacgatcgtggtggaagccttctgtgccttgtagagctccttgcgcttctcttcggtgagaatggaatcccactgcgggagcttatacagccactcggcctttgcgccgaccatgttgtaatagagcttttccggctcgtaatcaagggaaacctccgtctcggcggtcatgttctccaggtcgttttccgccttgagactctcgttgatgccgtcaaggtagccggtcatttcgatgatatccacgccgaagtggtcagcgagtgcctgcacggtgccgctcttcggagcttcgcccttgaggagcttctcgtaaaaatccttttctctaaggaaatattgtgtccagtactgttctgcgccgggctctgcggacttcttgtctgcaaaatcctgccaatccttaaaaagtgccatgatgcttcatccttttcgtatcttttaagcggctttcggttatcccctgaaagtctatttttgattataaccgaatccgctgcttttttcaagcagaaactaccctaatatattgaaaaatagtgccaaacgtgctattcttataaagaaatcccgattatatttcgattttttagttgaatttctattttttgagcacaaggagacaaaaatggaaccgaacaacgagcgcaaaacgcccgcgggcgagcaaaatgaactctttaaaaagcaggtcttcagcgatgagacgctgcgcaccgcagatcccgatgaagaagaaaccggtgagcagcattttgaaacgctcactttcgataaacccgtcgtgctcgacgaacgctttgccgcgcgcaaagcagaacgcgaaaccgcacagccgccgcaggcaaaaccggcggctcctcgtcctgccgcaaagccggtaaagcgccaagtgcccgccgcacagaaaaacaaatccgtttctcatgagcgcagattgtacagcggcgaaacaccgtccgacgcagcattgcgcatcacgcggcagattgcggcgcttgtgctgtgcctgctgcttgtatgcggcggcttctgggcaaagggcaccgtgtgggacatttggaccgaccgcgatattgaagacgtgcagaaaaacacgtattacagtgctgccgcaaacagtgcacaacttcgcttagatcagaatctccccatcggctacgacgccgcgcaggctgtatgtatttctttgggacagcccatttcgtcttccgctatccccgcaaaagcagatgacaaagacacgctcatcttccccgcagaccttacgggcagcatggaaacggcgctcggcagccaaaagctgcggcttgaaaccggccttacgaacaccgatcttttcaaagaaatctacaaaagcctcaaaaaaaagaagcccgtcatcgcgctgatgctcgtcgctgacgcagaatcggccaagctgcaatacggtgttgtgaccggccttgatgtccgcaacaaccgcgtgaccgtggcgctcagcgaaggcgtggacacgtacacgctagcagagttcgtcgctgccacacgctttgaaaacacgaagaacatcccgcttcgcttgcggttttcgctgcttttcggtacactttcccgcaatacggcgatctttttaaaatgagcgggctgaagattactctccccgcgccgtgcacgttcatcctctcccgcctacacgaaaacgattttgaggcctacgccgtcggcgggtgcgtgcgcgacagcttactacacaaaacgccgcacgattgggacatcacgaccgcggcaaagccgaaaaaaatcatcgagcttttttccgacattcccgttttagagaccggccttaagcacggtacggtgacactgctcatcgaccacgaaccgtacgaggtaacaacgtttcgcgtagacggcgattacacagacggccgtcacccggacagcgttgcattcacgaccgatattcgggatgaccttgcgcggcgcgacctgacgatcaacgccatggcctacagccccgcaaccggaatcattgacccgttcggcgggcaggaagacctgaaaaatgaaatcattcgttgcgtgggcgacccgcacaagcgcttttcggaagatgcgctgcgcctgatgcgcacgattcgttttgcggctgtactcggatttacggtcgagcccgaaacgctgcgcgccgtgcacgacctgcatgaggcgatcgggcgcgtcgcaaaagagcgcattttcacggagcttttaaagaccgtctgcgcaccgcatgccgccgaggcgctgcgtgccgcgccggagttgtttttttgcgccgtgccgcagctcgaaaatctcaaggatgtgccgcaaaacagcaaatatcacatttacgacgtatgggagcacacgctgcacgcgctcgaaagtatcggcacagatgaccccatcgcctgccttgcgattttatttcacgatgtcggcaaaaaagccgtccgcacgacgggtgaagacggttatgaccactttttcgggcacgcggagaaaagcgccgcgttcaccgatgaagctctgcgcgcgctgcactgcgacaacaaaacgcgcgaaaacgtcgcggagcttgttttgctgcacgataccgcttttccgaagcgcacggcaaagttccgccgcctgctcgcaaaactcggctatgagcagttctaccgcttgctcgccgtaagccgtgcagacagcttagcgcacgcgccgtggtgcatcgaagaccgctgcaaagcgcttgcggatgccaaaagcgaagccgaagcgctgcaaaaagcggatttctgcttatctctgcgccaactcaaaatcaccggcaaagacctgcaagcatttggctttcaaggcaaagcaatcggcgaaacactaaacaaactcttagacgctgtgctgtgcggccagcttccgaatgaccgcgaagtcttgcttttgcaccttgaacggtacacacaaaaacacaaataacatgcaaaccgcgccgctcggagcttttccgaaacggcgcggttttttcggcctttacttatatgtatcgtaaaggccgaagctgataccgatggcttcgttgacgcgctgcatggcgtcgtcatcgagcttgcccattttttcttttaaacggtgcttatcaatggtgcggacctgctccaaaagcacaatggaatccttttgcaggccggtgcgctcggcatggagcgcaatgtgcgtgggcaggtttgttttgtcgcgctggctcgtgatggccgccgcgatcaccgtgggactgaaccggttgcccacatcgttctgcacaataagcacggggcgcacgccgccctgctcgctgcccaccacggggcttaaatctgcgtagtaaatatcgcctctgtgtacattcacggttttcacactccgaacagaatttgcatcaacgcccgcgacgctacttatattcttgcccgttttttcggcgcttaaacacgcctgttccattctattacaaagttgtgtgttccgtgcaaaatgcgcaggatttatttgccctcgatctgcaaaaagacctgcggcaatttttcgatgaggtctgtcggcaacataccatgctgcgaaagcgcttcggcgcaaaggtcacccgccgcaccgtgaatgcacacggcggaatatgccgcttcaaacggccgcatattctgcgcgcacagcgcacccgtgatgccggccaaaacatcgccgctgccgccctttgccatgccggggttgcccgttgtgttcacacgcgtttcaccgctcggcgctgcgataattgtgcccgcaccctttagcacggtgataacgcggtacgtctgcgcaaagacacgtgcagtctgcaaacggtcggcacgcagttctgccatggtgcggccgtttagacggcacatttcccccgggtgcggcgtgatgatgaccggggcttgcggcacaagtagtttttccggcgttttggcaaggatattcagcgcgtccgcatccagaacgaccgtcccgtgcgcattttcaagtacggcatccacgagctttgtcgcatacggcgccgtgccgagcccgcagcccacaaggcacgcactcgccttgtcgatagcgtcaagcaccgcttcacccggcgcttccgtggggtcatacagcgtgaagattgcctccggcacggcgggagccaagatcgggtacagcgcatgcggaatggcgatgttcaaaagtcccacaccgctgcgcagcgccgcacgcgcagccatgatgcatgcacctgccatgcccacgctgccgcagatcattaaaagccgcccgtatgtgcccttgtgcccctccgggtcgcgcttcgggaacagcggacaaatgttgccgagcaaaacggattccgtgtcacacggcagcatctcaaggtgctcctccttgatgcccacctgacgcacaacggtcatgccgccgaagcccgctgccgggtacacaacgcccgctggcttcatcgccgtaaacgtcaccgtaaggtctgccttaaagcacgcgccctccaccgcgccggtatcacacaccgcgccgcttggaatatccacggaaatgtgaaacgcttttttattttccgctgcacgcgcaaacaaaggctccatcacgctcggcagacggccgtgaaagctgaagccgaacaccgcatcgatgatgacgtccgccgcgtctaccgcgccgcccgccgtgcggtacatgatgatctcaatgccgcggcccattttgtcatacgcctgctttgcaagatcggaggccggtgcgccctgcatcaaaacgaccgtcaccttcgcgccctcggccgccaataagcgcgccgccacaaagccgtcgccgccgttgttgcctttgccgcacaaaatgaccgttttcttgcctgtgacgtccattttctctgtcactgctgccgccaccgcggcgcccgcgttctccataagcgtttccatggaaacgccggattccaccgcgcatgactccagccctctgatctctgccgctgtcaatacccgcatatacctgcctcttttccgtagcattctatgctttaatggtatcattttcccgtgcggttttcaactatggaagcggtgaaaattaaaatcattttcgcgccgcatggaaaagcgccccgtcaccggaaaatctccgataacggggcgcttcacatttttgaatttagtttctgccgaagatttcaaactttaatcttctgtccataaacggcttaatggcatcgatgcagcgctcgtccggcgagaacacaagaagcgtcaagccggtcttgcgactctttgcaatgatgtaccacgcgtccttgccgtcgtccgtctccgccgcaaagatggtcttgtccacacgcttaccttttaacttctgcgcattctccgtgtacttacccatctcttcaatcgccttggcatcgaaagacgtgagacgtttacggtttctgcgattgatgatcttatctaccgcaatgtcgccgttcgtgatgctgtactcaaactccaggctgcgcgaggagatgacgtagtacacgccataaatcacgccgcagatcacgaggaacgggatcatcggcgaaaccggcgtcaggaaaatgctgacaaaaatcaagatcgcgccgaggatcgacacgccgagcgacatcaaaatatccttgctgccggtcttctttttcaccatgtattccacaaacacatctgtcatcatactgtaaattaccttccgtttccataattcaatattgtcattgtaccataacccacacggaagttcaactgcgtaatttgtgaatttttatcgaatattacgaatactgtgcgataaccgcaaaactctgtccataaaatcccgcgaaaggcttgaaaaccgaaaatttctatgctaaaataacagtgttgcgttgcgaggatacaaacgacgccgaacagtgaaacgcgatgaaaaagaaaagtagcctgtttttcgtgggcagagagggtgcgccgtcggctgaaaacgcgcctgcattgagtataggtgaagttctctttggagcggtgcggctgaaattaaagtaggctgcaacgggtagctgcgttaaaggctttcagagggcgcaatgcgccgaaattgggtggtaccgcgagcgttccggctcgccccatgttttgtgcatggggcgggcttttttcatgctcaccgttcggtacaaaacggaaatcatttatgaaaggatatattgatatgggaatcaaagaaagcatttccgagctgcgccagaagtttgacgcagacctttccgaagtgcgcgacagcgaatccatcgaaaagctgcgcgtttcgtatctcggcaaaaaaggctccgtcaccgagcttttaaagggacttaaagacctttccggcgcggagaaaaaagaattcggccagaccatcaacacgctcaagcgcgaggtcgacgaacgcatcacagcacacgtggagcgcatccggcaggaggaggaagaccgccttgtcaacagcgcagagcaatatgatgtcacgctgccgatggataccgactgcggctcctatcaccccatcacgctcgtgcagcgcgagttggaagaaattttcgcttccatgggctttacgattgaagactaccgcgaggtcgtaacggattacaactgctttgaggcattgaacattccgaagcatcaccccgcccgcgacatgcaggacacctactatctcgataacggtcagctgttgaagacccacacctcggccgcgcagaacaccatcatgaaaaagtacggtgcaccgctgcgtgccatcttcccgggccgctgcttccgcaacgaaagcacagacgcttcccacgagaacacgtttttccagatggaaggcatcatgattgataaagacatctccatttcgaacctcatctacttcatgaagaccatgctttctaaggtctttaagcaggacgtacaggttcgcctgcgcccgggcttcttcccgttcgttgagccgggctttgagcttgacatcagctgccacatctgcggcggcaagggctgctccacctgccacggttccggctggattgagctttgcccgtgcggtatgattcacccgaacgtgctgcgcgccggcggcatcgaccccgatgaatacaccggcttcgcgtttggtctcggcctcacccgccttgccatgatgcgctacggcatcaaagatatccgcgacctcaacagcggcaatctgaaggtgctctcgcagttcaaccacgaataagaaaaggagtcgttataatgctgatttcaatgaactggatcaacgacttcgttgatctttccggtctggaccttgaaaagctgattcaccaattcacgctttccactgcagaggtcgaagacatctattatatgggccgcgacatcaaagatgttgttgttgcgcgcatcgtttccatcgaaaaccacccggattccaaaaagctgcacctcttgaaggttgatgcaggcgacaaggtctatgactgcgtatgcggcgcaccaaacgtgcgcgagggcatgcttgttgcctttgcccgcgaaggcggctccgtttccggcatggggatcacctgcgcaaaaattgcaggctatgaatcgcacggcatgtgctgctccgaaaaagaactcggcatcagcgccgaccacagcggcctgtgggagatcacggatgacctgccgctcggcacacagattacggacgcgtacggcgtaaaggacgttgtgttcgaggtcgataataagtctctgacgaaccgcccggacctttggggtcactacggcatcgcgcgcgaatttgcagcgctgaccaatcgcgaattaaagccggtcagccgcatggatctcaccccctatgcttctctgccgggcatcgatatcgatatccgcgataaagagctctgctaccgctacacgggccttaaagtgcgcaacatcacgaagaaggtcagcccggttgatatgcgcattcgtctcttttactgcggcatgcgtgccatcaacctgcttgccgacctcacaaactacctcatgctcgagctcggccagccgatgcacgcgttcgattgcgcaaaggtcgattccattcaggtgcagcgcttctccgctccgttcgagtttgaaacgctggacggcacaaagcgccgcatcgacgaaaacacgctgatgatctgctccaaggaagagccggtcgccatcgcgggcatcatgggcggtctcaactccgagattgaagataacacggacagtctgctgctcgaatccgcaaactttgacgctgtaagcgtgcgcaagtcctccacgcgcatcggtttgcgcacggatgcttccatgcgttatgagaagacccttgacccggaaatgaccgacgtcgccatcgagcacttcatgcagctgctcaccgagatcgacccgggtgtggagatcatctcctccatgacggacgtctatgtccgccactacgacaaaatcgacatcacgttcgataagaaatttgtagaccgttacacgggcatcgatatttccgacgaacagattttgaatacgctttccgcgctcggcttcgcaccgacgcttgaaaacgaagtcttcaccgcgcacgtgccgtcctggcgtgcaacgaaggatgtcaccatcaaggccgacatcatcgaggagatcacccgtgtttacggctacgataacttcaagattacgaccacaaaggcagctttggcgccggtcatgcgcaccgcgggcaacaatgatgaccgctggacgaaagacctgctcgtacagcgctacggcatgcacgaagtgcactcctacatctggtgcgacgcgaagaagtacaaggaactcaacatcgagattgaggacaacgtgcgcgtcatcaacgccatgacgccggaccacaccgtgctgcgccgctccatggtgccgacgatgatcacctatgtcaacgaaaacaaagcatacgcaaacgatttcggtgtgttcgagattgcccgcgtcatcaacggcctcggcgaagacggtctgtgcgatgagcagaagcacctcggcattgcgctgtacagccgcactaagagcgaaaaggacctctacctcggcctgcgcgacatcatggcttccatcagcaaagagctgaagcaccgttactttgagttccgcatcgcggaagcaaagcacaactggcagcacccgcgcaacaccgcagagatctatctcgacggcacatatgtcggctttatcacggtcgtacatccgtccgtacagtcgaagatcgataagaaagccgtcatcgttgccggtgaactgaacatggatacgctctcctccatggcagcatccgttattcactatgaggagccgtccaagttcccgggcatcgatatcgacctctctctcgtcatcggcgcagaccagacgtacagcacgctttccgccgcatggcagaacgtcactcctctgctcaagaacgttgcgcttatcgattcctacaacggcgtcgtcaagagcatcacgctgcgctttacgttctcctcgaacgagaaaacgctcgcgaagaacgaggtgcaaagctatgttgacaccatcatcgagaacctcgcgaagatcggcgttgtgctgagataatttgttaaaaattttcgtaccgcttgctttttttgttgttttgcggtatgctgtatacagtgtttattccactgtgcttttatacgcgaataaaacaccgggcccggcatacaatgaaatgtagactgtatttttgcagcctttacacgatcggaaaacgaggaggtgttccacatgtcagaagatttcagcgaccgcacccagacattcagcattgagacgccgcagaagctcgatatgcagcaggtgctcgtacaggtttacgatgcactcaaagaaaaaggctataaccccatcagccagatcgtgggatatattctctcggaagatcccacatacatcaccacgcacaacaacgcacgcagcctcatccgcaagatcgaccgcgatgagttgctgaaagcaatggtgcgtacctatttgggcgaataagcctgttttctgatgcgctgtcgctttatgcacggcattgcctgaaaccgaaattgccgcttggcggatttttccgccggcggcaatttttattttcaaatgtgcaaatacaagttgtcttttttcttaatctatgctatactgattaaaagtgtattgaatgctttgcaccggcgcttagaaagttccggcattttccccaacgagactttatgaaaggatttgcatactatgagcgaaaagcagaagagcccgtttcccatgtaccgcggcaagccccttgtgcgtagcggcgataccatttactacggaaacatgaccgataaatacgtcatcaagatcgacatcaaaacgaagaagaccgtggaggacatggaggttgccgataagtgcactgtgcagctcatgctcaccgacccggagattcgctccagaaaacagatcgtaaagaccagcgagaaaaacggcctttatcttgctttggacatcgccgatgcctggcttacccgcgcattgacagaataagccgttaattccgcaaaaaaatcaccgagaaaaccgtttgtccggtttatctcggtgattttttgttttattctttccttctcggctgcttgccgtgcttttctttgcgctgacgtttgttttggtacatggcaatatccgctttttcgagcatttcgtcatacggcgcggcaacttcatctatgaagcagcagcccatggagaaccgcagcggtacatgctgtccatcgtgcagcacggcttcggagctgtcctgcgcctgctcaagctgcgtgagcttctcccgcagcgcttcttcgcttttttcttcgaggaacaggacaaattcatcgccgccgtgacgtgcagtaaggccgctttcgcccacgatcttttttaagatttctgctgcggaaatgatatattggtcgccgctctcgtgcccgtaggtgtcgttgacctctttcaagtcgtcaaggtcgatcatcaccacggcgtaagtatcgcctgtacccgcttccaaaatgcgctccacgcggcggctcaggccgcggcggttataaagccgggtcaacggatcggtgtcacgctcagattcgatctgcatgcggcgctgcatctcctccgtcacgtcgttcaccacgccgaaaacactgctctcctcgtgcgtttcctccagctttatgtagcggtccggctcgcccggaatgcggtatacgttgcgctcgccgaccatgcggctgcggcgcagctcctcgatgaatgtatacaggtgtacgcggtcaccggtgtagtacgccgtctcctcatccgtccacccaaaaatctgcgggatacgctccgtgcaatacacctgctgcacgccgtcgcggtactcgtacacgccgatgttcatttccgtgcggctcaaaacgtatgacattttgcggtcgttgttgacaaggctgccgaccatctcgttgatgtatcggctgagcgcagaaaactcccggctgctctgcacgttgactttttcctccaaatcgccttgcgtgatgcgattgagcttgccgtttatgcggtgaatgtcatgaataacgtaccgattcacgcagttcgcgacgaaaaccgtcaacgtaccgcagattaaaatcagacatagcgccagattcaaaagatcaagcggaatacgttcgtacaatacgtccatcggaatgatgaaacccatgtaacgggtttctatcttcttaaaaacgcagtagtagtatttcccctcaatatttgcgtgaaagccgtgctcctcattttgcatgctctcggcagaaataccgagctttgccacggtcttccccaccatatccgcattcgttgcgccgatgaccgacagcgtttcactgtctacggcacagtaatcgatcgccgggctgatattgagctgatgaaaaatatacgaaatctcgtttttctccatagcctccgttacaagctgcgggtctttgcccacctgcacgatgaatgtaccgtctgcgctccacacggcggaatactgcatgcttttgccctcagcggtgttcgggccggcatcctgcacaagctgcaaggatttatccgtgagcatcggcgcaaaaaacgccatctgctcaccggaagaaaacgaatagccgtaatactccggatttgtgccggaaacaatcgtgccggtctcatcaaaaatatgaatttcatcaagctccagcagattcgcatattttttcagctttaaggtatcgtttgttgcctccgggtctttttgcagcagaaaggcaatggcttcggcatcatgcaaacaggtcttatcgtatttttccttgacctgcttcagttcattctcattttcttcgataatctgctccagacgcacaaatgtaccggcagcggtgtcttccacgcggccctgctcaatcagaatttccgcaaaggcgattaccacaaggatcactaaagccatcacgattgccgcagaacgaatatagcgattgataatttgcttcagagatttcataggttcaccgccgtttcatttaagtttgaataaaaccaaattggttttgagtattgcatttgaaatcaagtatatcacatatatcgtattttgtccagaaatacaaattgaaacaacaaatttcacttgttttttgcatgaattgacgtgtttcgcaaggatatcgcaaaagcgtcagccatcgttttaaggatctcccgcccattttacaaataacgcttgaatttttgtaaaaagcgcaccgcccacccgtaaagcacggacaagcggtgcgccaaaaattgatatttagctttctgtacgcttcaaattgctttcgccaaaatgcagcagtttttctttatgagtgaagtaatacaccacgcctgtaacatccgcgaggaaccaaccgatcggcaccgaccaccagatgcctgtaacaccgatgacagcggataaaagatatgccagcaccacgcgcgtaccgagcgagatgaccgtcagcaccacgctcataccgggctttgcgaccgcacggtacagcccgtagagcaggaataagcagccaatgccgcagtagaacgcaccctcaatgtgcaggtagcgcacgccctcggctataatctccgtttcgcccgcttccacaaacagcagcataaacggctttgcgaacacgaacaccaaagcggacacaatcacgcaaaacacaacggatacaagaaccgcacctttcaatcccttgcggatgcgttcctgcttgccagcaccgtaattctgcgcgatgaatgtggagaacgcgttgccgaagtcctgcacaggcatgtacgcgaatgcgtcaatcttcaccgccgccgcaaacgccgccattaccgccgcgccgaagctgttcacaagcccctgcaccatcaaaatgccgaggttcatcacggactgctgcacgcaagtcaaaatggaatacccggcaatctcccggatacggctcgcgcggatgggcgaacggctgcacagcgcgcgcagctgcggacatttgatgagcgcgcagatcatgatgccgataccggaaacatactgcgcgatgaccgtggcccccgccgcacccgcaacgccaaagttgaagccgataacgaaccacaagtcgagcgcgatattcaaaaccgccgagaccgccaaaaacacgagcggcacgacagaattacccaccgcgcgcagataagacgcgaagtaattatataaaaacgttgcgaaaatgcccgcgaatacgattgcgatatacgcacgcatgtcgccccaaacgtcgtccggcacctgcaaaaagctcttaatgaggtcaagacacgcaaatgcgaggccgtttaaaagcagcgtcacgcctaaaatgagcacgaacgaagcccgtacactttcttttaaggcaatttcatcgcgctgcccgaagcggatggaaaacagcgcaccgctgcccatgcacagcccaagcaagatcgatgttaaaaatgtcatcagcgaaaacgaagagccgaccgccgccagcgccgttttgccgaggaagcgtcctacaatgagcgtgtccgcaatgttgtagcactgctgcaataaattaccgaggatcatcggcagcgcaaaccacagcatagaccgcatcaccggcccccgggtcagatctttgttcatattaaaacctccgcagcgagttttatacatcaaaaaagcccgacacaaaaagtgtcaggcttttggtgccggcgaccggatttgaaccggtacgatgtttccatcgagggattttaagtcccttgcgtctgccgatttcgccacgccggcttaaattatcttaattataatagcacatcccggctataaaatcaagccattttattccggcatttcatatttttctgttcaaccgcgtaaaaaggcaccccccggctaagccgggtactcggaaatcctaaaaaggcatattacagacaacgcggtctgcttggccatttcctttgctccattcataacgtcggtatgaaatatatatccgtaaaatcaaatgtcaataggcgaatcggaaaacgcacacgcaagcccgaattctgcgctttcacgctccttccattgcccacaaaaggctgatttcgcaaaaatcgcaaatttttcaactttttgcatttacaaacatgcgctttatattgtatactataaataaaagaccgggcgcaaggcgtgccggaatattccatctataaggagttcgtattatgtactatcttggtgttgacgtaggcggcacaaacattgccgtcggtatcgtagacgaaaacaacgcgatcatcgcaaaggcttcccatccgacgcccgttccgtgctcggaagacgcattctgcgatgcgattctcgctgtatgcaacgatgcacttgcaaaggccggcctgaccctcgacgatgtaccgtggatcggcatcggctgcccgggcaccgttaaccgtgctaccggcatcattgaatttgctaacaacctctatttcaagaacttcaagctccgcgacatgatggcagagcgcacaaacggcaagctcgtcattctggagaatgacgctaacgcagcagcttacggcgaatatcaggcaggcgcacttgcaggcgcagacaatgcactggctatcacacttggcacaggcgtcggcggcggcattatcatcaacggcaaggtctactccggcagcaactttgccggcggcgagatcggccacaccgtcatcgttgttgacggtcgtccctgcacttgcggcagacacggttgctgggagacctatgcttccgcaacgggtctcatcaaaactacaaaagagcacatgaaagatgccccgaaggactctccgatctggacaattgttgacggcgacgagtccaaggttaacggcagaaccgcatttgacgctatgcgcgcaggcgacccggttggcaaggctgttgttgacgagtacatcaagtacctctccgtcggcctcaccaatatgatcaacatcttccagccggctatcctctgcatcggcggcggtatctgcaacgagggtgaaacgcttctcgctccggtcagagcattcatcgatagagagcagtatgctatgaactccacgaagaagacgaaggtctgcaaggcgcagctcggcaacgacgccggcatcatcggcgctgcactgctcggtaagcaggaggactgatttttcccatgtctcttacaaaatccgtgttcggcacgttcccctgcgggaaaacggctgacgcttatacgctgaaaaacgcgtcaggcgtgacgcttgtgctcacaaactacggttgccgcattttacagcttttaacaccggacaagtccggtaagctcggcgatgtcgtgcttggccacgccacgctcgaggaatacctcggctccgactttcagggcacgtttgtcggccgctacgcaaaccgcatcggcggcgcaacgctcaccattgacggtgtaacgtatgcactcgatcaaaacgacggcgcaaacacgctgcacggcggcacaaaaggctaccatcaagtactgtttgatgtgaaagagtcgaacgacagcgacgaaccgtctgtcacgttcacacatgtcagcccggacggcgacgaaaattaccccggcaaactgaccgttgaagtgcagtacactttgacggccgacaacgccgtggagattacctaccgcggcaagactgaccgtaagacagtgttcaacccgacgaaccactcgttcttcaacctgaaagccgacggctccaaggacgtgctttccacgcttgtgacgatccacgcgtctgaggtaacggcggtcacagacgacctcattcccaccggcgagttgctgcccgtaaaaggcacgccgctcgatttcacggctgcaaagccgctcgggcaggatatgttcgcggatgaccacctcatccagctctgcggcggtttcgaccacaacttctgtgtggacggcgagggcatgcgcgagattgcagtagcctacgagccggagaccggccgcgaaatgaccgtctattccgatatgcccggcgtgcagctgtatacgttcaatggcacttccggcctgaagaacaaagacggcagcgacatgattccccacggggcactgtgccttgagacacagttctacccggattctgtgcatcacgagaacttcccgttccgctatgtcacgccggagaaaccgttcgagtccaaaacaatctataaattcactgtgaaataatgtgggagggctgccgcagggcggccctttccgatttcatcgcctgcggttttccgcggcaaattgcaaggaggtcattttttgaaaaaagaaatttcctgcggcgcggtcattgcgcggcaagccgaaaacggacgtgaaattctgctcatccgccatgtaaacggcggtcattgggcgtttccgaaaggccatatggagggtaatgagaccgaaagcgaaaccgccttgcgcgagatccgcgaggagaccggccttacagtcacgcttgataccggctttcgcgctgtcgtcacttactccccgaagccggacgtcatgaaagatgtcatctactttgcagccgaatacatcggcggcgaagcgcaccggcaggtagaggaagtcaccgagctctgctgggtaccggcagaagaagctgcagcacacattacgtttgaaaacgataaagatgtgctgaggaagtacagagaatattgcaaagcataacaaaaagagcgtgcaaactttcatctgcacgctcttttcttatgctcatgtagctttaagcgaaattacttaacgatctcgccctcaacggtgccgccgagtgccgctgcattggactcatcggtgtcgatgtgcatagcagccgcatacttcgggctgacacgcacaacaacgtcgccgaaaatcacgctgcgctcgccttccttgccaaccttaacggagacaatctgcttgtcttccacaccggctgccgctgcctcttccacgttgaagtggatgtggcgctttgctgcaatgacgcccttttcaatgacgacttcgcctgccgggcccttcaacgtacatcccggggtgccctcaaggtcgccggactcacggatcggtgctgcaataccgagcttgcgcgcgtcggtcagtgcaacttcaacctgcgtctccgggcgcgtcgggccaaggatggacataacaagggaacccttcgggccgatgacctctaccttctcgttggaagcgtactggccgggctgagagagttctttcttaacggtaagctttgcgtctgcgccaaaaagcgtcttcagatccgcttcggacacatgaacgtgacgtgcggaggtttcaaccataactttcatttgaaaatacctgtcctttccggattttgtatttctattttactacgaaccgacagaaaatacaagttttgggctatgttttttctccgatttatgataaacttaatgcagaaaagaccgtaatttgaaaaaacgcgaaaagtcggtgtgaaatatgtttgaaaactgggaagaattgaaagaaaactgcctgaactgccgcaagtgcagcctgtgcgaagcgcgctccaatgtcgtgttcggcgtgggtaacccgtgcgcgaaggtcatgttcatcggtgaaggcccgggccgaaacgaagatttgcaaggcgagccgttcgtcggtgctggcggtcagctgctcgataaatacctcgccgccgtcgacctcgaccgccgcacgaatatctacattgcaaatatcgtcaaatgccgcccgccgcaaaaccgcgatcccttgcaggaggaacaggaagcctgcatggactggctgcgcaatcaaaccgccttgctgcgtccgaagatcatcgtatgcctcggccgtatcgccgccatgcgcatcatcaaacccgatttcaagatcacacgcgagcacggacagtttttcaaaaaaggcaacatctacatgacggcaaccctccaccccgccgccctgctgcgcaatcccgcacaaaagcccgccgcgttcgacgactttttaaagctccgcgataagatcgacgagcttcaggcagatatctccaaaacatattaaacatacaaaagctgctccgtttttacgcggaacagcttttttcgttttaattataaacttgcatgaaccttacagcagctttgcgcggagcgcttcgccgctttccgggtggagatacgccggagcaacgtcaaagacggtcttgcagcccacctgaccttcactgtgcatgcggtatgccgcgcgggcaaacgctacaagcacactggaagtgaactccgggttggaatcaagcgtcagcttatactcgatgacgtgcttgttttcgccattcagacccgtcacaccggtgcggaacaccatgccgccgtgcggaatacccgaatggtcgcggtcaagctcttcctggctgatgaagtgtacggtcgtgtcgtaatcggagaaatagttcggcatcgtgacgatggcttcctcaatggcagccttgtccgcaccctctttggcaacgacaaagcactctcgggtgtgcttctcgcgcgtcgtcagctccgggttctcgccgcggcgcacgctttcaagcgcgctctccaccgggatggtatactggcgggcatcctgtacgccgggaatgcggcgaatcgcatcggagtgaccctggctgacacccttgccccagaacgtgtagtctttgccgttcggcaaaatcgcctgaccatagagacggttcagagagaacatacccgggtcccaaccgacggaaatcatgccgaggtggccgctcttcttgcaggccgcgtctacgtccgcaaaatgctccggaatcttcgcgtgcgtgtcaaagctgtcgatgacattaaaatactgtgcaagctctgcggtttgcttcggcaggtcgttcgcgctgccgccgcacaggatcatgatgtcaatcttatccgtcatgttttttgcctgctccatagaataaaccggcacgccggtcttcgtcttcacactgtccgggctgcggcgtgtgaaaacgcccacaagctccatatcttccgtgtgggaaagcgcactttccacgccgcggccaagatttccgtatccggcaatgccgattctaatcatttttatcgctccttcatgtatctttcaaaatcataatagcgcaagttagtttacactacgatttcaatttccgtatctattatacgcaaacgcacgatattttgcaagagaaaatgcagggaaacttgaaaaagccgtcacaaaacagctgttttctgtcttgtaacggcttttgtctttttagttttaacgcaaaatcagcgaatgttatacacgctgcgcatatgaataccgttcgcgttgccgctcacaatgcggatacggcgctcttcaccggcttcgaggtcgaagtagttgtcttcaagtacccagtcctcgttctcgttcagtacttccacgctcttcgcgtatgcctttgcggaaacgataatctcatcgccctccacacggcaggaaagctgcgggtcgatgtaatcgtaatacttcggcacggagaacagcacggtggattcggagatcatctcgccgttctggtagcacgcatagtgcacgtggtcggtgaacatgttcgcttccggcagttctacggtatcgagccacacggtgtccattgcgggcacggtgatttccacctcgccgccgtcgcgcagaacctcggagcggttgttgcgcagctcccacttcacggtgaccgtctgcggctgcatcgtctcgttggagacgttcaggcggatgctctttacggtgtcggtattcaagtcacgacactcgcggttcgggttcgggtcatccaagaagcccttctcttcgcaggagagcagcaccggcgcgaagaagcgcttttcatagtagtgcagcgccttccagcggccgaagtagtcgatagacgaccaagaagcaaccggccagcagtcgttcagctgccacacgatcgcgcccatgcactgtccgcgatgacggcgccagtgctctacgccgtacttcatcgcctcggcgctcaaaagctgcgaggtatacagcagcgtgccaaggcccgcagtcgggtaacggtacgtctggccgagatatgtcatgatcttgctgttcgccgcgttgttgcgctgatgcttctccatgacataggagaaaatatttctgtcttccggctccgtgaaggattcgaccgttttcagcgtcgggaacgcctggaagccgaactcggaaacatagcggaagttgtggttgcggtagtccgtaaacggcaggctgccgtgccaaacgtcccagtagtgcacatcgccgcgcgtctcgtcggacgggttgtcaaagtcgccgccggaggacgggcttgagggccaatagtacgtctgcgggtcaagcgcttttacggtcttcggcagaatgtactcgtaaaggcgcgtgtagtcgcccttctgcttcggggtcagctcccacatcggcgggttgcccgtcgggttgttcggcatcagcgccaaaccgccgaagaatgtgaacatctccatctcgttgttgccgcaccacaggccaagggaagcgtggctgcggatgcgtttgatgttatcgttgaactccgcacggagattttcttcaaactcgtcgctcaaattgtaatgtgcgcaagcaaacatgaagtcctgccaaatgacgaggcccagctcgtcacatacatcgtagaatgcatcgctcgggtaatggccgccgccccatacgcgcacgcagttgtggtttgccgccacagcctgctcaaggagctttctcgtacgctccgggttcgtgcgcggcagaatgttgtcctccgggatatagtccgcacccatcgcgaagaacgtcacgccgttcacttcatgcgcaaagctctcgccgtactggtctttctcgatgtgcatcgtcatcgtgcgcagaccgatgcgcttttcccacgtatcaacggtctcgccgtcacgctgcaaatcgacacgcaccgtgtaaagcggctgctcgccgaggccatgcggccaccaaagctgcgggttttccaccacgatctccttcggggagcctgtgtagaccttctcctcgccgttcggcgtcgtgagcgtcacggtgtaggtcagctccgcgccgtttacagtctcgatctccggctcaataccgagcgttacagtgttctcgccgtgcgtctgcttcacgtatgtgctgatgacgcggccgccgttcacgccgcaaagcataatgtcgcgccaaatgccggcatcaggcaggcggggaccccagtcccagccgaacatgcagtgcgccttgcgcaggttcgggaagccgaccattgcttcgtcgctgccgcccgcgtggcagatcttatcctgctctttgatgtactttgtcggcgagtgaaacacgatctcaagcgtgttgccggtcgttttcaggctatcttttacgtcaaattcccacgtgcggtgcatgttgcacacgctcgcgattttctcgccgttcaaaacgatgtcagcaatggtgtcgaggccctcgcagcggagcagaacgcgctcgctgttcaaaacgtccgcattcacgtcgaacgtcgtattgtagcgataatcctcgtccatcagcgccaacgctttcatctcgttgtcgcgccaataggggtcttccatgcgacccgcgttcagcaggtcattgtacacggagcccggcacggtcgcggggatcgtgtcattttttccgacggtcgtcagctgccagccggaatgtaaaagctgttttttcatttctcttatcctctcgttttatccgttaaaacgcgcgaatttcttcactttcgttttaatcggtctatatgcagtatagcaccggttccacaaattgtaaagcgacttccgctcctttattccggtaaagcaaaagattcgcaaaataccgaaaactccatcgatttttcgtgtagttttcagggtaaatttagctttccgctttccgatttgaccgcttcgccctcctgcttttcacccagaaaaacagtgcgccgaaaagcgaaagcatcgcaatcgcgcccccggccatccgcgcgggataagcagcatcgcgcatatagccgttgtaatcctccaaagacaaaatcaccttcatctccgttttcagcgccgctatattcacaaattcagctttgtcaagctgttcagctttcgctttttcaacccgaaacgatattttttctccgattttcagcgcttctatgtcctctacgcccatctcattgcagatactttgctgtaaatacagccccgctttgaattcttccgtgttgatctccacagagatattctctcccgtgtccatgatcaccgtacttttcacagtcgctgtgaaaagtacggtgttatcttcgctctgcctgtcgattccacccatagagatcaaaagcccggtcgatacaactaaaatcaacgaaaatatgattacagctattttatttgtatttttcacgcgcatgcaacgcctcatttcgattttgcgtactcacattatttatatatcccacattcaaaattcaactattccagtctgctcgccgcttccgatacacttttccaaagcaaattgaactctttttcagtttcatcatatcatattcgcctgcactgcacaagcaaaatatttccagatataacaaaaaagcacctacaaacgtaagtgctttctttctggaggtgacacccggatttgaaccggggaatcagggttttgcagacccttgccttaccacttggctatgtcaccattttgaaaaagacgctttatcttcagcgtctttttcttttggagcggacgacgaggctcgaactcgctacctccaccttggcaaggtggcgctctaccagatgagctacgtccgcatatggtgcctccgatcggaatcgaaccaatgacacggggattttcagtcccctgctctaccaactgagctacagaggcaaatgtggcgacccggaacgggctcgaaccgtcgacctctagcgtgacaggctagcgttctaaccntgtggcgacccggaacgggctcgaaccgtcgacctctagcgtgacaggctagcgttctaaccagctgaactaccgggccacatttggtggggacaataggactcgaacctatgaccccctgcttgtaaggcaggtgcttcgttttgtgggattgctgttgtcgttttataaatctgaataaaagcaagcaacgtcaattgtaatctgagattccatacccacatctcagactgatttaaaaagttaatagtaatgagtgcaaaggaagggtatggattttcctttacaaattcaagagactgactggattgttggtctcttttttgctatgctttgattt

SEQ ID NO: 18 - DNA, 294759 bp, Intestinicoccus colisanans
  source 1..294759: mol_type = genomic DNA
atttattattcttttgttggcaaggtgggcttgcccgaataaccgcccgacctatccgacacaatgcgcaagtgccggataggaacggcaaaattttttacacttctattacttctttatcacacatcagtaaaaagccagggtatgaaacagcttatggctaagtagatgtaatcaagaaaagaaaggaaaagcacaatccagacggaaccggcgattgtgtcaagaaatgtttgtggaatagcaagaactttgatataatgggaacaggaaccccggaaccgggagaaaggcaggaggataaatgcacataagctataaacccctctggcacacgctggttgagcgcaatatgaggaaagaggacttgcggattgccgccggtcttaccacaaatatgattgccaacatgggcaagggaaagaatatcagcatggaaacgctggttcgcatttgtgaagccttgaattgtggtattatgaatgtgattaaattagaacaggacaatatctaaagcgatataattttatattttattcgatttgcacaaaaaattaaattttaatggtgtatattttctattgtacccaatgtaaataagtgctatcataaaataaaacaagtacatttgaaacattttatgatttgagagtgtgcttgcaggttagtagcatattgccaataactgaatacaaaaaatgtaggttctggtcattttagaaaggagcattgtttatgaaaaaatttagtaaaagattgtttacctcgttggtagcgttttgtatgcttttttctgtgagtgcggttcctgcttttgcagcggaaacaacaacggaaataacggatactcaacagccggtagtcattggagaatatgacggatacttaaccgatgttatgatttccgatggtgtcaccaaaagagcagtcgctaatgttcgtattaactcttatgcaacttatgatgaggatgatgggattcaagttcatgtgaagttgtatgtaccgtggtatgaatctccaaaaccggagttcactggtatgactggtacagttaatgtgcttatgaacaaaaaatccaccaatacggcatttgcagaattagccgacggtgaagaaacaatcgaaactgatgtggatactggaagaacaggtaatagcggagataagggaacggtttctgtttctggtgttgctaccgctaataatgccttggcaggcggtggagctttcgctatttcttaccctgtgacacttccctaattaaatgcaaaacagttgtgaattaaggttggtaataggtaaaatgaaacggttattggcaatatgcgtatgtttttttatgtgtgtaggcttatgttcgtgtgattcttcccaaactcggtcggtatcatcatataactggtctttagaatttattactgatttagatggtaatatgttattctcaggttcagtgcatgatgacataccagtattggatttgacattgagttttgaagaaaaaagttttatcttaacagataacactcataaacaagaatggacaggtacatattcgcttgaaaagattgacaattcttcttcgaaactcggattaacttttgaaaatttagaggagcctgttacaggcgtatatggaacaagagtttattctgatgattcagaaagcgcaacaattacattacaaactgatgaaaatatcctgtcttttgttggagaagattcataaataaaaacagccgctgtaggaacaaaatcctacaacggctgtttttatttccacggcctgcgccggaagttcataccagactgttttatcagcggggatttcttgaacagctttttcaaaaggcttcgttcctcttgtgagagccgcttgtatttgagccggaacgccttgcagaatatctccgtgaattgctgaaccctgtcccccggagattgcatggccttttgtacttcccgtataagttcatcggcaggcgtggtatccggcgcactttcgctgtcattttcgtgcgccttgcgtatatcatggagaatgacgtcccatgttttgtgcgtcacatggcagaaaaaatcttcttcctctatctgacaggcttccaacactttgattgcccggtctgccgcagcttcggggtgttcttccagtaccatagcccgtaaagcagccagtgagctgtttgtgtcatggaagtgcatggttgctatcccgtccacatagatttctgcgtctgccagcaattccttaaatttttcatgggagataatctcacacagcagccggttattgaagcgttcacttttcagcagttccacgacttcatcactcaaatgtaattcttctatcggggtgttttcatatctccgattattggtaaggccgagcagatagtcaaccgacacctgatagaagtctgccagcttcaacaggctgccgtggttaatttccttgtattcgtcgttgtcgttttcataactgccgagggctgattttgaaatgccggtttcctgtgccagttcttccagatttaagccctgttccacccgtaaatctttcaggcgttcctgtacggaaatgcgggttttcatagatacatcgctccttcctgcggctggctgccgccgtcaatcccattataccatacctgttccgcaatcgtggaaattttcgattttggggcggttttcctactttgtggatatacgggagaaggctcaaaaatgtgccataatgggcttagttcatcgatggattattccaatcgaatgaccggcctgtatgggatatgctccccggcgatgtagcgcaacgacttgcggcagggaaatggaggaaccttgaccgcaacgagcgtaccaaagggagcgaaacgccgttgtgagagccaggggcaggaacgacatcagggagaaccggcgaaaatgaacaccgaattgataccgaaacacaacaatccgatagggtatagtctgccctatccgtaatactacgggggatttccgggcggctctatggccgcttttcccttgaaaatcgccccgaaacacgacactaaaatctgctatccgtctattgcggctgttacggctgaaatgggcggatttttgtttaaggaggcaccatgccgagaatgccgaaaaagaggaagctggaattgtccttcttcctcaatgaacgggggcgggtaacgtacaacgacctttgccggaaatgtcagcgtacttgcaagcagagtttccgggcggtcattgtggactgcccccattatctttccaaacgctcaaaacgaaaagtaaaggaggacatcgattgaatggaagttgaatttatgaccgcagacaccgccctgccgccctgtatgccgctgccgagagccatgctgcggctcccgatcagcagcaccgccaaggtcatgtacgcccggatgttggatattgttttcctgtccggcatagaggacgccaacgggattttatttatccatttccccatcgtggaactggcggcggcacttgcccgcagcaccatgaccgtgaagcgttccctgaaggaattggaggacgccggattgatactgcgggtgcgtcagggcttcggagaacccaacaagatatatgtactcattcccaagaaggaggacagccgcctatgaatgaaaaactggaaaaactcaatcaggagatagagaaaacagaaaaggagctgcggagggcgcagcatgaagaaaagatattggaacaccagataaagacgctcacacggaaggaacggacgcaccggctttgtaccagagccgccatgctggaaagctaccttccccacccggaagccatcacggatgaacaggtcagtttgttcttgaagctgctgttccacaaagacagcacccgtcagcttatggaaaaagtattcgccggaaacggcaattttcagggagaggacgcaggccggaaacggccatgattgctttcagagccgcaacccgtggactgcccctctgaaagagggcgcaactatacaccggtcgagccggtgcgttgcgtcctgccggaagccccttgcagggagcggatgattgcccgcagcgttccggcttctgtcaatcatcacaggggaagctacacttcccctgcgctggctgccgccagctacccctttgtgggcttgccgcccggaaacaccttgcgctgcaagctgttcccgttcagcaagttttatcagtcgagctatccttatctacggtaatttagtataataaggtcaaaaaatagaacgctatcattgtgcaaccgatatgcaactgataattgcttgatagttggtggtagcaacacggtaattcagatagaataaagccaacaaagaaaggaggtcatccaaatgttagtaaacgtcattatgattgtagtcggaatagttttctcatgtatctttgtcggcttgcttacccttgttattcgtgcattacttaaatatatccgcacagaggaataaagccgacagcaacattaggaggtggtcaaatgaaagtaaccgtatttatgataatagttggaataattttcttatgtatctttgttggtttgcttacccttattgttcgtgcattactcaaatatatccattcaaaagatgtacggcaagaaaaatccgtagtgaggaaatcgctgggtgaagcactcaaagcacacagaacacagtgcaaaatgacgcaggaatttgttgctgaaacgattggtgttagcaggcaggctgtttcaaaatgggaaaatggaacatctgacccttccacatcaaatctttttgcacttgcaaaactttacggtgtttctgttgaagaattactaaaagaaattgaataatctttatacagatattttatttcatcttcgggccaccctgacccgaactttcaaaaccgaataccagccgcccaccggcggcaccaccgagcaggaaatcttgaaacaggttccctgctctttttttgcccggacgccgggagaaaggaggacactacttgccatgcccgcactttgatgtaaaaatcatccagcgcagcaagcgccagtcagccgttgcgtctgccgcctaccagagcggggaacggctgttttccgaatacgaccagaagcagaaatactattcccataaaagcgaaatcgtccacactgaaatcatgctgccgccctatgccccgccagagtacgcagaccggaataccttgtggaacgccgccgagacacaagaaaaacaatggaactcccagcttgcccggaggttcgtgcttgccataccgagggaacttcccccggaacagtacgccgaccttatccgggactactgccgggagttttttgtttccaaaggcatgattgccgacttcgccatccatgacaaaggggacggaaatccccacgcccacatccttctaaccatgcgggcgatggacgaaaccgggaaatggctccccaaaagccggaaggtttacgaccttgacgagaacggcgagcgtatccggcttgcgtccggcagatggaaaagccacaaggaggacaccgtggactggaacgaccagaagtacgccgagatatggcggcagggctgggctgatacagcgaaccgctatctggaagccatcggcagcccggagcgccttgaccttcgctcctatgcccgacaggggattgataaaatccccaccgtccacatggggccagcggtcagccagttggagaagaaaggcatacagaccaacatcggcaacctgaaccgggacatcaaagctgccaattccctcatgcagtctatccggcagatggtacgcagcttaaagggctggctgtccggcctgaaagagaaaaaggcggcgctgctggaagcactggaacaggcaaaggagccgaccatccccgaactgctttcccggtatctggatatgcggagcgaggaacgcaccggctggacttccaaggggaagctgaaaggcactgttggcgatttcaacaaggtcatggaagcccttgacttcctgcggcagaaagagatctccaccgtggagagccttgacgcctatctggataaggtcagcggggagatactttccgccaagaccgacatccgaaaatcggaacgccggataaaggccatcgacaccaccctttcccatatcgccaaccacggagcctacaaggaggtttacaaaaagtacgcttccataggttggaaaacccggaaggagaagtttgccgccgaacaccgggaggaactggacgcttaccttgccgcaaagcgttttttcaaagcccatcaggaggaactgccctttgatacaaaagaattgaagaaggaacggacgcagctttccgaaaaactgtctgaaaagaataagggattgcaggcggttcaggcggatatgaagctgctgcgggatgtgcgctactggataaaccatgtgctgccgcccgaccagcgccgggttgtgccggagccgggaaagaagccgtccctcaacgaacaattaagctggaacatcgaaggcgtgaagcagcgggaagaacagaaacgccagcagccccaccgccagcaaaaacaggatatggaactttaacccatcaggcgcttgccattttccccgtgagaatgacaggcgcttttcttattttcaggaggatttgcctattgaacgtatttgaagccgtgaagcagtctgttaccacccggcaggccgccgagcattacggtgtccgggtgggaagaaacgggatgtgcgtctgtcccttccatgacgataaaaaccccagcatgaaggttgaccggcgcttccattgtttcggctgtcaggcagacggggatgtgattgactttgtttcccgtctggaaaacgtcagccccaaggaagccgccctcatgctggcgcaggacttctccgtcccctatgaggacagggagccacccggcaggagccgccgtcccaagccccggcaggaaagcccggagcagcaattcaagcgcatggaacgccactgtttccgggtactgtccgactatcacaatctgctgcaccgctggaagcgggactatgcccccaagacaccagacgaggaatggcacccgcttttcgtggaagccttgcagaaacaatcccatgtggaatatctactggatgtgctgctgttctccgatatggaggaacgggctgccctgattgccagctacggaaaggaagtgaggaaccttgagcggagaatgacagaccttgccgcccgaactgcggcaggccgtgacggacaccatcgaagccgcacccccgccccggagcgttgaggaagtgaaagccatgctggaaagcaccgagaaaggcggcgttcgcaacagtattcaaaactgcctgaccgtgttccagtatgaccccgtcctttccggggcggttgcgaaaaatctcctgaccgagcgtattgaccttctaaagcccatcggcaggaaacgcagaaccggcagcaaggccatgaccgatacggacatgaaatatatccggctgtatctggaaaagacctacggcctgaccagcgagaaaaagatagcagacgccgccgatctggccgcagacgccaacagctaccatcccatccgggactacctgaacggccttgtctgggacgggaaagagcgtatccgctactgcctgcggcactttctgggagccgacacggacaacttcacttaccattccctgcggctgttcctgctgggagccatccaccgggctttctgccccggctgtaagtttgaggtcatgctctgtctggtaggcggtcagggagccgggaaatccaccttcttccggctgctggccgtaaaagatgagtggttttccgatgatttgcggaagctggacgatgataacgtgtaccgtaagctacaaggccactggataatcgaaatgtcggagatgattgccaccgccaacgccaagagcatagaggaaatcaagtcatttttaagccgccagaaggaggtctataaaatcccctacgaaacccacccggaggacaggctgcgtcaatgcgtgttcggcgggacttccaatgcgctggacttcctgccccttgaccgttccgggaaccggcgcttcctgccggtcatggtctaccccgaacgggccgaggtacacattttggacgatgaagccgcttccagagcctatatcgaacaggtatgggcggaagccatgacaacctacaaaagcggcgattttaagctgtcttttacacccgaaatgatacagtacctcaaagaacaccagcgggattttatgccggaggacaccaaggccgggatgatacaggcgtaccttgaccgctacaccggcagcgccgtatgttccaagcagcttttcaaggaagccctgaaccatccctttgacgagccgaaacaatgggaaatccgggaagtcaacgacattatgaaccacggtatcacgggatggaagtatttctccaatccccggatatttgaaggatacggcaggcaaaagggctgggaacgggaagccccggcaacgggcgctgacaacgggcgtgaaaaaacgccggacggatttgtggaggtcacggagcaggtggagcttcctttctgaaaaatccggggaaatgacagccggttgccgaccccgttgctatcccgttgccgggccggttgccgggaaaaagcccgtaactgcgggcttttctcccctctgacaaccaaagcaacagaaaaataaaagaaaaagtaataaataacccaaccgccagacagagattgttttcgaggttttttgaagcccgttgccggacttcgttgccgaccctctcctgtctggctcatttcatttatggaggtaactgcctatggcaaaaagcaaaactgaaattcatgtcacaacggtatttgacggcgaactggacgctacggacgttttcgtgagcctgattgcacagaaatacagccagagaaatgataaagaatatcttgcgaaaaagcaagatttagagtataataaagacaaggttcagcatgaccgtgttccgtctggattgtgcgggtaaacggttatgatgaacggaatggaatatacaggcatggacgcaatactggcgggcagcttccgggcggctatttattgcaggctttccaaggacgatgaccttgacggggagagcgccagcattgcaaaccagcgggatatgctggaaaactactgcgagaagcagggatgggaggttgttgcagtctatcaggacgatggctacacggggctgaacatggagcgccccgacctgaaacggatgttgaaagccatcgagcgcaggcaggccaaccttgtgataacgaaagatttatcgaggttaggcaggaattatttgcagaccggcttcctgattgaagatttcttcccccgccacggcgtgcgctatatcgccatgaatgacggtatcgacaccatgcgggacaacaacgacattgcgccgttcaagaacatcctcaacgagatgtacagcaaggacatttccaagaaggttcattcctcttatctgctgaaagcgcagaaaggccagtttaccggctgccttgcccccttcggctaccggaaagacccggaggacaaaaaccacctgctgattgacgaggaaacggctcccattgtccggcgtctgtttgcgtgggcgctggaaggacacggccccaactacatccggcgcaggctggaagaagaaaaaatcccatgcccgacctactggaaccgggtgcggggctttcggaacgtgtcaaccaagtgggaaaagaaagacccggtcaacgggcggtatatgtgggacttctccgtgattaaggacatcctgatgaaccccgtctacaccggcgctattgcttcccagaagaaggaataccgcttcaaaatcggcaccatcggggaaaagaagccggaggactggattgtggtggagaaccagcatgagccgcttgttgaccgcaagacctttgacatcgtgcagcgcaagctgaaatcccggcagcgcccccgccagaccggggaaatcagcctgtttgcggggcttatcaagtgcggcgagtgcgggaagtcgctgacgatccgctacaccaacgacaagcacccgaagcagatttattcctgtaagacctacaacgcctacggcaagcagcactgtacccagcaccgggttgagtacgacaccctttacagccttgtgctgaacaaaatccgggagtgcgccagagccgccctgatggacggggaagccgttgccgggaagctgaccgacacctgcgaagccgaacagaaaggccagcgggaagcgttggagcgttccctaaccaaagacgaggaacggattgacgttctggaaaagatggtgctgcggctgtatgaggacatggttgccgggcgtatcagcgaagcgaacttcaatctgctgatggaaaagacgcagaaggaacaggccgagttgaaagcaaaggttgaggaaggccggaagaagctggccgatgaaatccggcttgcgtgtgacgcccgccagtgggtggaagccattcaggaatacgccgacatcacggaactggacgccgccaccttaaaccgcctgattaaagaaatcgttgtccatgagcgcatagacagcgataagacaagacacatttctatcgaaattcatttcaatctcaaacccatcccggaggtggagcaggtcacggcctgacctgcccccgccggggcggttcttaaaaactccatagatatttcttgacacgccgccgcccgccatcgagccgttttcctacacctatttggggataaaacagttgatggccggcggcggtgtcgccctcatcggcatcacccttgtacctctgctctccggcctgttcggttgatcgtccggcggtgatcgcttatgggcggcatactcgacaaactcgatgaatggctccgagggctgctcatcgaggggatcacgggaaacctgtcgggcatgttcgatacggtcaataccaaagtaggcgagatcgccggtgaagtgggacagacgccgctggcatggaacagcggcgtcttttctatgatccgaaacctctctgaaacggtgatcgttccaatcgccggggttatcctgacattcgtaatgtgttatgagctgatccagcttgtgacagagaaaaacaatctgcacgatgtagacacctggatgttcttcaagtggattttcaagaccttctgtgcagtcctcattgtgacgaacacatggaatatcgtcatgggtatcttcgatgtggggcaaagcgttgtgaacagcagcgcaggcgtcatcatcgggaatacctccattgatatcagcagcgtcatcacggatatggaggcgcagcttgaagccctgggcacgggagaactgttcgggctgtggtttcagtccctttttgtgggacttaccatgaacgccctttccatctgtatcatgcttgtcatctacggccgcatgatcgaggtgtatttgacgacttccgttggaccgattccgcttgccactatgacaaaccgggattggagccatacaggacagaactacttgaaatccctgtttgcattggcgttccaggcatttctaatcatggtgtgcgtgggaatctactctgttttggtacagagtatcgccacggacggaaatatctcaggcgcgatatgggcctgcatgggctacacggtcttgctgtgcttcgccctgttcaagaccggcagcctctctaagagcctgttcggagcgcattaaggaggcttgataaattggcgtatgtaaccattccaaaggatttgacgaaagtaaaatccaaagtgctgtttggacttaccaaacggcagcttatatgtttcggagcggcggcactcatcggagtaccgcttttctttttgctcaggcgcacggccagcaacagtgccgccgcgttctgcatgattatcgtcatgctcccgttctttctacttgccatgtatgagcggcatggtcaacccctggaggtggtggccggacaggtcatccgctgtatgttcctgcgaacgaaggaacgaccttaccagacaaacaatttctacgcagccctggagcggcaggcccaggcggaaaaggaggtgaaagccattgttcagaaagcgaaagccagagccgcaggcacggcaggcggcaaaacctacggtaaagctgaccgctgcggaaaagcgtgagatcagccgtatcctggaaaccgccagaggtgacggcaaggtacattccgcacaggataccttaccgttccgccagatgtacccggacggcctgtgcaagctggacgaccacacctggtcgaagtgtatcgagttcgaggatgtgaattatcagcttgcaaagcctgacgaccagacggcgatctttgaagccctctgcgatatgtataacgcccatgacgcttctatcgggatgcagctctcccttgtgagccgccgcatgaaccgggaggattttgtgaagcgtatcgagatcgcggcacagggagatcacttcgaccatatccgtgagctttacacgcaaatgctccgcaagcagcttgaacggggcaacaacggtcttatcaaaacaaagtacctgaccctcaccatcgaggcacgggacagtaaaaccgcacgggcacgattttcccggatcgtcatggacaccctcaaccatttcaaggtcatgggggctttggcaaaggagcttggcggcaaggagtggctggaaatgctccacggcatcctgcacccggacggggagcggtttgcctttgaatggagctggcttgccccttccggcctgtcggtccaggattttatcgcaccttcttctttccgcttcggtgaagcaaggaagttcacgatggcggataaattctgtgccgtgtcctttctgcagatcagcgcaccggaaatggatgaccgtatgctcaccgaactgctggatacggacagcgggctgcttgtcagcctccatatccgcagcatggatcagaacgaggcgatcaaaacggtcaagcgaaagatcaccgatattgacagtatgaagatcgacgcgcagaaaaaggcggtgcgggaaggtttcgatatggatatcatccccactgaccttgccacctacgcaggcgaggcaaagaatatcctccgtgacctgcaaagcagaaatgagcgaatgttcttaatgaccttcctggtggtgaactttgcggacagcaagcaaaagctggagaatgaccttctccgtgcggcaagcgtggcgcagaaatataactgctccctggtgcggctggactttcagcaggaggacggcttcgtgtcggctctgcccctgggagtcaaccgcattaagatacagcgtgggcttaccacttcggcggtggcggtgttcgttcccttcaccacacaggagattttccacggcggcgaagccctctactatgggctcaatgccacttccggcaacatgatccttgctgaccgcaaaaagctgaaaacgcccaacggcatgatcttaggtacgcccggcagcggcaagagcttttccgcaaagcgttccatcgtgggtgtgttcctgaacacaaaggacgatatcctgatctgcgacccggaggcggaatattttccgctggtgaaccgtctggaaggccaggtcatcaaaatctcacctaccagcacgcagtatgtgaaccctatggacatcaacctcaattacagcgaggatgataacccgctggcgctgaaatcagactttatcctgtcgttctgcgaactggcggcaggcggacggaacggcctggagccggtggaaaagacggtcattgaccgtgctgtgcggatcgtgtaccgcccctatatcgcagacccccacccggagaatatgccgctgctggaagatttatatgacgagatcaaacggcagccggagccggaggcgcagcggatcgcggcggcactggaactgtatgtgcatggcagcctgaatgtttttaaccaccgtaccaacgtggatatcaacaaccgcattgtctgcttcgatatcaaggagctgggaaagcagctcaaaagcctgggtatgctggtgatccaggaccaggtatggaaccgtgtttcccagaaccgggatcagggtaaatccacctggtatttcgtggacgagttccaccttttgctgcgcggcgaggttggttcctggagcgtagagatttggaaacgctttcgcaaatggggcggtatccccacgggaattacgcagaacatcaaggacctgctttcctccccggagatcgagaacatctttgaaaacagcgattttgtgtaccttctgaaccaggccagcggagacaggaaaatcctctgcgagcgcctgaatatctccaaccagcaggcggcgcatatcagcaacgcaggccccggcgaggggctgatcttcttcggcaatgtgatcctgccttttgtggatgacttcccgaaggacaacgagctttacagcattatgacaacaaaacttggtgaaaccgggaaaggagaaaacgaacatgaatgatccccgctatttgcatacagaagaaaaacaggaaggtgaaaccttctttgatgtgatgaaccggctgatcgccagaaacaaggcggtcacggcggatatggaggcggtccttgcggagctggaaagtgagatcgaaccgttccgtgcgccgaagaaccatgaataaactgacccatgtgagcctgttttccggcattggcggtctggacctggcggcggaggctgccgggtttgaaaccgtctgccagtgtgagtgggcggattttccgcactccatcctctccgcacgatggccggatgttcccaggttccgggatattactactttcacgaaggaggcgttttttgaaaaaacaggacttgaaacagttaccgttatctcaggcggctttccctgtcagcccttctccaccgccggaaaacggaagggctttgcggatgaacgctacctgtggccggaaatgtgccgcgttattaccgagctgcggccccgttgggtgcttggggaaaatgttgctggcttcatcaatatggggctcgacaaaacgatctttgacctggcaaaagcgggatacgctgttctcccattcgtatttccggcttgcggcgtcggcgcatggcatgagcgccagcgaacttttatcgtcgcggctgatgtttcccacaccccttgcctccgacaacaacaccgccagggacgcggcaagcctggatgtgttcctgtcggacaatgggatattccgcaagaggaaccgaaacggggcgatctggagcctgagcctgtcggcggcggtattctatctgaccccggtggcgtcggacggtttccgctcgaccttgaagccgtcggccttcgatccagcgaagaaggacgggaacctgtcggcgcaaatcatctcccaggaacagccggtgtccgaaacggcagcactgaacccggattgggtggaatggctcatgggcttcccgaaaggatggacggacgtatcctctgggccgccgagccagaaggaatcccccgcatgaccgagcgcatggatgaccgggcactgcggctgaaaacattgggaaatgcggtctgcccgccccaggcctatcccattttccgctatatcgccatgatcgagaatggtacctgcggcgacttttgcccttatggaaaggaaggtgactgcctatgagggaactgaaagcgaccgataagatcacgcagaaaatgacccgtgacggtgcggtatcggaaaaccttgccacgggcgaggtggaacatatcagcagccgggagccggaaacggagctgtccgtttcttcggaagaatccgctggcgctgcggctgatcttgccctgcgtgcggcggaacgccatgagaggaaagccgcacgaaaagcggaaaaggctgacacccaggcggtacgggatggttctgctgcaaggcagcgcccgtcctcccgtctgcaattcaccgaggaagaacgtgccgatcccgcacttgggaagtacattgaccgttccgaccgtgcggcggacaggctggacgcggcgaaagccgccatccccgcaaagaaagttctccgtaccgagcgtgtttttgacgagacagccggaaaaggcaaaacgcagcttcactttgaagaagtggagaaacgccccaatggacgcctgcggcacaatccgctttcccgaccggtccatgagatcgtccacgccgcccatgcgaaggtgcatgaagtagagcaggaaaatgtgggtgttgaggccggacacaaaggcgaggtgttgacggaacgcgggtttgcctacggaaaaggtaaagtccgtgccgccatccaccatcaccgcacaaagccctggcgtgacgcggcaaaggcagagcaggcttcggtcaaggcaaacgccgagtacctttatcaaaaggctctgcatgatgatcctgcattggcggcttctaacccggtatcccgctttctgcagaaacagcggatcaagcggaactatgcaaaggagctgcggcaggcggagaaaaccgcaaagaacacagcggccacggcgaaaagtgcggcgcagaaagcaaaggacgccttcaaggaaacattcctctacatcaaacaccatagccgggcggtgctgttggtaatcggcattggcgcctgtgttgccctgctgtttggcggggtatcttcctgttccatgatggcaggctccggtgtgggcggtgtatttacttcttcttatctctccgaggatgcggatatgctggctgcagaggcggcctactgcgaactggagcaggagcttcaatatgagctggaccactatgagactctgcaccccggatatgacgaataccgttttgatctggacgagatcgagcatgacccttatgtgctgatctccattctcacggcgttccatgaaggggtgttcaccatcgacgaggttcaggctgaattgcaaatgctctttgaaaagcagtatatcctgacgcagaccgtggaggtggaggtacgctatcggacggagacacggacagacagcgaaggaaacgactatgacgtggaagtaccatacaactactatatttgcaatgtgaagctggaaaacttcaacctttcccatgtgccggtctacatcatggacgaagaaacgctttccctgtatgcggtctatatggcaacgctggggaaccgggaagatttgttcccaggctccggctatgtagacaagtacaccaaaccgccaaccacctatgatatcccgccttccgcactggaagatgaaacctttgcggcgctcattaccgaggcggagaagtacatcggctatccctatgtctggggcggcagcaatccgaacacttcttttgattgttccggcttcgtgtcctgggtgctgacgcaaagcggcgtctgcaatacgggcaggctgggagcccaggggctctacaatatttccaccccggtatcctctgccaacgcaagacccggcgacctgatctttttcgtcggcacttacgatacaccgggcgtttcccatgtgggtatctatgtgggcggcggaaaaatgctgcattgcggcgaccccattcagtatgcagatatcaacacaagctactggcaatcccacttttacgctttcgggcgaccgccctacaactaaaaaacgatatggaggtaatttgatttatggcaacgacacagaagatccgcaatgacattgcgaaaaccaaagaaaagatcacggagcagcagaaacgccttcgtgcgctggaggctcagcttgcggaggaagaaaatctggaaatcgtccgcatggtgaaagccgtgaagatggacaacaaggaactgactgccttcctgaaagcctatgccagcggtatgatctccctgccggaaggtatgctgcaggagggcaacaccgagaatgaggaaacggagggatacgaagatgaagcataactttatgacaaaaatggtatcggctcttttggcggtggtgctcagcacttccgctttttctgtcaccgcctttgccagcggcggcgaggaaagcacggagtccgtggctgaacaggaaacggccggtgatgtctctgatctgctttccgctctggccggcagccaggtcacggtatccgtcaccgaggatggtatccagttcagttccggcgaaaatgactccggacagaccggcaccgtcaccacgggcggcggcaatctgaatgtccgcacgggtgcgggaatggactacaccgccttcacccagcttcccaacggaacgaccgtgaaggtgatcggcacggacggcgactggctgaaggtcatcctgccagagaaaatcggctatgtctattccggctacatgacggtaagtgacggcgaggctggctccggggaaggtcctttctctctggacgcggaaacgctggaaaatctgctggggatgctgggcggcggtctgaatggcggtgccgccctgacgccggacgggaacctttcgctgatcgacgatatcggcagccctaccaccagtggcaaacagtttatcacagtggaaacgaagaacggcaatgtgttctatctcattatcgaccgtgatgacgagggcgaggaaaccgtgcattttctgaaccaggtggatgaagccgatctcatagcgcttacggaggatggagaaaaggcggaaacacctattgtctgcacctgtacggaaaagtgccaggccggagcggtcaataccgcttgcccggtctgcgtaaaaaaccttagtgaatgtgttggtacagaacagaaagctgcggagcccaccgaaccagagaatccggagcctgaaaagaaaagcaatgccggggcgatcgcggcggtgctgctgatccttgcggctggaggtggcgcagcggtctatttcctggtactgaaaccgaagcagggcaagaaagttcccgctgatctggatgatttcgacctggaggatgaagaagaatatctgactgaggacgaggaaacggaggaaaagaatgagtaaactgattatcgcagaaaaaccgagtgtggcaaaatctatcgcatcggccctgggtgcttcatccagggctgatggcttttatgagggcagcggccttctcgtatcctggtgcgtgggacacctggtatccccgatggatgctggcggctatgacgaacgtttcaagaaatggcgctatgatgatcttcccattctgccggaaccgttccgctatgtgctggcaccaggcaaggaggacgcttttgaaaatctctgcgccctgatggaccgccccgatgtggataccatcgtcaatgcctgtgacgccgggcgtgaaggtgagctgatcttccgtctggtgtatgaaatggccggctgccgcaagccggtcctccgtttctggatttcttcgatggaggacagcgctatcagggagggcttttctgatctgcgccccggcgccgattatgaagcattgtatcaatcagccctgtgccgccagaaagcggattggctggtgggaatcaatgccacgcgccttttctccgtcctctatcaccgcaccctgaatgtaggccgtgtgcaaacacccacgctggcaatgctggcggagcgtgacgcaaagatcacgctgtttcacaaggaaaaatatcatttgctgcgcctgacgctggatggagtcgaagcagtgtcggagaaattcaccgattcggcagcggcggaacaggcagcggccatgtgcaagggtgcggccgtcacctgtacctctgtcaagaaggaacagaagaaagaacagccgccgaagctctatgaccttaccaccttgcagcgggaggcaaaccgcctgtttggatatacggcgaagcaaaccttagactacgcccagagcctctacgaaaagaagctgttgacctatccccgcacggacagccggtatctgacctctgacatggcggaaacggcgtcctgcgtgatccatctggcggcaaagctgccgccctttgatggctgcacaaacttcttcccgctggtggaggccatgatctccgacaaagatgtatccgaccaccacgccattatccccacgatggagattgaaaaaacggatatcaaggctctgcctctgggagagcgtaatttgtttctgctggtctgctgcaagctgctgtgtgcgtcggcggagccgtatgtgtatgaggcggtcacggctgcctttgactgcggtggccattccttcaccgcaaagggcaagcgcgtcatctctgaaggctggcgggaaatcaaccgcattttccgtgccttcttgaaggaaaagcctgcggatggggacggcgatacgctcccggacttcaccgaagggcagacttttgacggtgcggaggtttccgtcaccgagcattttacccagccgccgaagccctactccgaagataccctcctgtccgctatggagaacgcaggcaaggatgatattcccgatgaggcggagcgaaaaggtcttggcacgcctgcgaccagggcggctatcatcgaaaagctggtagcagccggatttgtggagcgcaagggcaagagcctgatccccacaaaagccggtatcaaccttgtcacagtcttgccggagccgctgacctctcccatgctgacggcggaatgggaacaaaaattgacggagatcgcaaagggcggcgctgacccggataccttcatggacggtatccgcacgatggtccaggagatcgtgtccacctattcctgcatttccgaggatggcaaaaagctgtttgccccggagaaggaagtgatcggtacctgccctcgctgcggccagccggtttatgagggcaagaagaactttgcgtgttcggatcggtcctgcggtttcgttctctggaaaaatgaccgcttctggacgagccgcaagaaggagctgacaaagaaaatggcagcggaccttctgaaaaagggacgtaccaatgtcaaggaaatgtggtctgaaaagaaacaggctgcttatgacgctgcggtgatcctggatgacacgggtggcaaatacatcaacttcaaactggaatttccgaaaagaaaggaaggtgtcaatggcagaaaataagactttggaacatttacccgaagtgagggcggcggtggctgtcctctccccggaggaccgaaaactgctggcggcagtgcaggcatcgcccttcaagctgacagcgccggagcagttcaaggagtttgcggccaacatcgactatttcgtatttgagcccaatatccacgatctgaacgatctggggtggcggtatctggcacagcacatggatatgctgctgcccccggaacttctgaaagcaatcgaccctgttccgtttggcaagtacgccatgcaggaggaacagggccattttacggaacacggatatatttctctctccggcgacgagtgggagcatgaacgccctgcggagccggagaaaaagccctccatccgggaacggctggaacagggcaaaaaggaatgtgcggaaaaacacaaggcgcagcctcataaggaaaaatctgcgccggaactataaggaggtgctgatatgccatattacgatcacgacaaagattatccctttgccgcctttatcaccaatcttggaaagtacaacgagggcgagcttgtgggcgagtgggtgaagtttcccaccaccgccgaggaattgaaagaagtgtttaagcggatcgggatcggccagaaggatgacttcggccagccctatgaggaatggttcatcacggactatgactgctatgtggacggtctttacagtaagctgggtgaatatgagaatctggacgagctgaattatctggcgtcgaagctggatgaaatgagcgaaagcgaatacgcacagtttcaggccggtatggaaatgggcgaccattgcggcagcctgcaggagatcatcaacctcaccgaaaatctggattgctatgaggtttaccccgatatccatgactatgacgatctgggccgctattacatcgaagaactggacgttatgcaggtgccagagcatttgcagaattacatcgactatgaggcctacggccgggacgttgcgttggaggaaaacggcaccttcacggatcagggctatgtgcgtgatacgggtgacagtttccatgagtattacgacggtgagcgcggcagtatccccgacgagtaccgggtgatgaccttccaggacaatcttcccgaagaagaaaaatccgagtgggctatggatattgcctttgacatggacgagtttttccgtcagaacgatccgcagtatgcggcggagcacccggaggcacacgccgcaaaggaagaactgtatgaaaatctgatggccggacgcatttccactctggatgaaaagctggcggcactggggcagacgcaggaggactatcttccctcggagattgaaaaattcaaggacgccacgggctatgaggaatttcttgattttgatccggcggaggtcaaggccgctttggatgacccggagaagtcccatgcggatgaaatgctgtccgctgcggagaaggttgcctcggaaaagatgactgtgcttgtagtggagcctatgaaggaaccctatgtgaaggagatcgcccccgatcttcattccctgcaggcggaggtcggcggagacattggcgcaacttatccctattctgacccggtggcgctggtttgcaatgatgaaggaaagctcatagggcttgatctgaaccgtgggctgcgggatgaaaatggagaaatttatgatatcgtagcagggactttcctggtggttggacttggtgaggaagattttgcgtccctgtccccggaactgattcagaaatacacggaacagttcataacgccggaacgatttatgcagatcaatggcaatatcgttgttctccctgtcccggcagagaagcaagacctcgcttatctgccagaccgttttgaaactggcgaacgtgtgcagacaccgaggggcagctttcaagtgacggctatgagccgggaacagatggaggcagccggttatggtgtccaccatatttccgatgatggaaagtatcttatcatgggaaacggtacacgggcctttgccgtggcagcggagcagccggaaaaggacaatcctctccgcaccgctgaaatgacgctggaggatgactacggcatgatcgacggtgttatcaacaacggcagacgcggcgaggaattggaaaaagcccaggagtacgcagaacggacaacgccggagaagccttccatccgtgagcggttggaggatgccaaacgggaatgtgctgagcataagcccccggagggcaagaagtccggtcgtgatgtgccggagcaggactgcctatgagccgaagcaagaagtggcggctggaatgggcgttcttcctgggcgagaacggcaggcggcagtataaccatatctgtaaaaaatgtgttcatggctgcaagcagagtttccgggcgtgtctggtcgcttgcccgcattacagttccaaacggtctaaaatctgtgaggatatgggtggaaaaaacacagaataattccctgtatccgtattttcaaaggtatcctttatgatttttcatgtgtcggtctgcttgctggcacatgaaaaaaaaggcttgatttcagacactttctgtcacgcaaaacgggagtacagcttttcggttcatccgattggctgtactcccgctttttctttttgctatcatcaaattactttaacacggttctgttgtttgaacaggggtacaaattgtacctccgttgaaaaggaatttccatagtattttctcattaggattggataggaaaggatggatagccgccgcagtaggcgttgtgggaatgtgtgtaaactgccaggattgtgaggctgtgggaaagctgtttgcagacttgtgggaaaaggcttgcctttttccatcaggttgtgaatggcttttccatcggcacgagcggcagttttccatatttccatgacgcaaaaatcagcctacaatcagccggtacaccgtcagcggcacataccataccgctacgatcagccgccataccagaacgaaaccacctatcacgccgccgataatgaagttcaatgcaaacagggcgatccctccacccagggagccgccgccaggcacgatccagaggcacatccgatggagtccaaacggcagcccgcagagtatccagagccatacatagtcaagctctccgttcttcacgcaggcggatttgaagatacaatacagaatcagcgccacggtcacgggcaatacgcttttgaagaaaaatgctttgattgcttcgcttcttatcatctgtaaaacctccttccgcagttccattatacaggatgccgggagctgcgcccagcgtctttcaaagaaatttattccagttcataccgccgctgttgttcctgttcctttggaacggtcagcagcgcatccacattctgcttgacggtatcgtattcctgagcttcggttcttgcggctttgtattcagcaaggagccgttccttttctgcgttgagattggcaagctccgttttcatgttttccgttgtcggcagcggcacagcacccagccgtttcaattctctggcggccgcttcaaaaaggatgatctcgctctcatgtccccgcaggaacttttctttattattcgatttgcggtatcggtcatagatcggctttagctgacggtaagtttcagcgtgcttcatcacaagggtaagttcggcgcttctgctttctatccgcttgatctctgcatgagcagtatctctccatgcggataatgcggttagcttgctttccagttctccatagctgcttatcccgtgttcggtcaggaaatttatggtcttggcggcctgtttcagattgttcagcttcgcccaatgggtgaagcctgcgctctgctgcgccttgatgttgttctggatatcaatgagcaggctgatctttccgttttgctgtttcggctggcgggaaggtctggagcgtccggcgatccgggcggcaagggcttcttcggtgtagtccacacccagggttttcagacgggtaaaccgttcctgattcggcgctctggcggagatatatttgccccgcttgatctcatagccttctctctgcaggcggcgaagcagttcttccaaatcggaacaggctggcaggagccggtcgatggccgctttcagcttcgccttatagctggtgccattctgcgcggcctgatgttcaatatagctcttacccttgtcctgtccggggatgatgacggacagaccgtgttccttgcaaagccggtctgaggtgcggcggatatcgtgatagcttcgcttgttggaatgatagtgcttgtgatccgcaaagctgaccgcattgaaaatcaagtggttatgaacatgatctttgtctatatgggtggtaagtacaaactcgtactttccgcccaggatttcttttgcaagctccatgcctatttcatgggcctgttccggcgtaacctccccaggctgaaaggcttggatcaggtgtcggcccaggttcgttcccttgtcgatggcgtggcggcgggtccaggaaaattcgatatctgcagtttcggcggcgcagccataggcggataccaggagcttcccgtctgttttctccgggttgcagatatagtcaatggctgctttcagcgttgacttgataggatgtgtctttgtaactgccatatctcgtccagcctttcccgtatctcgtccatgtcggcctgatacgcaggagctccggcgttgatccgcttggcaatctggttgatattccgaccaatggcggaaagctctttggtaaatgccttgatatctgcggtgtccgtatagatgatatacccgtcaatcgccatcttgcggaggtaggcgccatatctgcgtgtggggagctggctcattttttcgtctatgagccgtttttcatcctccgtaacatagaatttcatttggatattccgctttcggtttgccatgcgccgcctccgttctttataagggtttgggactatcccaacaagcaattttgaattttcgggcaagggacctgaaaatttcaaaattcgcaagcgggtactcgcttgctgtgcttgctactgtaaccctaccctcattctccctctactaatactacaatttgaaacggagattttggctattttcatctgaaaatctttaatagcatgggcgttcatcaaaatttgacacaggagaaattatcacatatacttaatggtaattagttataacgaaccgaaaggaggaatgggtggtgctgacctatgaaaaacaagcactctctggtacgattgaagtattattgcggtctgaattgccagacgaatttgaagggacaaagttatacggctctctcgaagaagatgaactacggcaggactgtaaaatttttcggctgtcaaatgaaacagggcatggacgcattacagtctatcaggttttttctggtattgagctttactataacgatatgcacatgggatattgcaatcaaaatcaagccacagctaaaaacatgatagagattaaccattgtctgataggacgttttgagtgtagctttggtgaaaatagttgctgctatatggcggaaggcgatttgtcgatcagctccatgatgaagaaaaagtcaaattcgtgttttccgctgaaccactatcacggtatttctatcgtcatcaatctggatgaattgctgccggaagtacggcaaatcatggagctattgaatattgatttgcactacatacaaaaatatatttgcgaaggaaaccgttgctgcatcatgcgggccaatccgtctattgaacatattttttcggaactctatcatgtccgggaaaaaagaaaaccaggatacatgaaagtcaaaatgctggaactgcttctgttcttaagtgatctcaatacggcagaagaagttttacagacggattatttcaatcaaaatcaggtcgcattgattaaagcagtagcgtcctatattacggaggacttgacagcacatcatacgattgaacagctttcccagaaattcgagatttctacaacagcattgaaaaagtgctttcgaggcgtctatggaacctctgtctattcttatcttcgtacctatcggcttcaagtcgccaaaaaaatgttgctggaaaccgagtcgtcagtaacggagattgcaagtaaaatcggatatgaaaatccgaataaattcacttctgccttcaaagaaacgtatggcagctctccaacggaattcagaaagagtgtccgtttggatagaagcgggtccgtatggagtggcgaagaaatctgagctgtattagaatatcctttgtcagataaaagcagaaagaccgcttgaagctggcctgttttttgaatagcgggttagacgttgctaactttctgcaagacaaaggaggatttccaaatggaaaatgaaaaatcgacaggtaacaagtacactgtcaaagacgcggcaatcatcggtatcttctgtgcggtcatgttcgttgtatttatggtctattcgatcctgaccggcgcttcactgttctattccatgatttttaacgccgctggtgcggcacttatcctcgcaccgttctatgtttatatgtgcatgaaagtcggcaagcatggccccgctcttgtctacaatatcatgtgggcgattatcgccggattgatgatggggccatttatgattccgtggtttttgggcggcggcatcatcgcagagctttccatgtgcggaaaggatgcctaccatgacattaagcgtgtgtctatttcgtgggtaatcacggcactggttcgcgctgcacatggtatgtcagaaatttggtttttcaaagacgcatttcttgccaccggcgtcagcgagcagcaggttcaggctcagacccagtattacaccgatccgaagtacgtccttttgagcctggctgtcaccgctatcctggccgtccttggctgcatgattagcaacaaactgattgtgaagcacttcagaaagagtggcgcgattaaataaactatgagcatgaaatttgattttcgaaccaaattgcttgtcatagttctcactatgtcgcttgtggcggtgctcacaagcgacattttgatatacacacttttgggcgttttgagcgtgtatctgattattcagggctttggcaggcagacaataaaatatttgatcgtctgcggtatttttatcgtgttgaggttgctttcaagaggacagggcattaccattcttatgccggaaatgttcctgttcatggtgctgcgtattttgatgatggttatggctgcgcagcccgtgattggtatgccgccgggagaagttgtagcagtttttaagaaaatccacgcgcctaatggaattgccctgcccgtaaccttcatgctgcgtttcttccctactgtgcgcagtgaattttctgatgtgttttcctcccttcgactgcgaaagctgttgtcatggaaacaccctctggacgcaatggagtatattgttacgcctgttattttccgttcatccagaatagccgaagaacttgccgcttctgctgaaagcagggggatttccaatcctgggaaacatacctgccgcagaaaaatagaatttcaaaaaagagattggattatgtgcgtgattgctgtttgtgtaactgcattctattttgtgctggaaaggacggtagcataatggtaaatgataaagcaaggcgatccgttatccagtttgaagatgtatcttttgaatatccgggagccgaaacagatagtatccatcatatcagcctcgatgtaaaagagggcgagtttcttgttctgactggagggagcggctgcggaaagacaactttaacacgattggtaaacgggttaggcgaacaattttacgaagggacactgaaagggcgcatcacactgttgggacgcaacatatcggaatatcctctgtatgaaatcgggaaaaaagtaggttcaatctttcaagatccaaagagccagttttttgccagtattacagaggatgagatttcgtttgggtgtgaaaattatggcgttccgtatgaagaattggataggcgggtttcaagtgcaatcaagcgtattaacggagatatgctgcgagggaaagaaatttatccgatgtccagcggggaaaaacagaaaatagcggtggcctccgtcaatgctgttgatccggaaatttatgtgtttgatgaaccttcggccaatttggatatgtattccgttgaggcgcttaaaaatttgatgggtggacttaaagcggaaggccacacaatcattgttgctgaacaccggctttattatcttactgaccttgcagaccgttttctctatatggaaaacgggagcataaaagaagaatggacggcgggagaactgcgctctattccagaagaaaaaagacgagccataggaatacgagcggcagatttgcaccatattgaagtagatatttcttctgtaaaagaaaaagatatgacgatggaggtaaaggatttggcgttttcctatcgcaaacatccggttttccatgatgtatcttttcaggcgtatgctggtgatctgattgcgattgtaggccataacggaataggaaaaactactttgtcgaatattctttgtggtatgcaaaaggaaaaagagggtcaggtcatatataacgggacaaaggtatctaaaggcaaacggaagaattttgcctactttgttatgcaaaatacagattgccagttgtttggggacagcgtagaagaagaactgctattaaacggaaaaggcagtacccaggagcaacgcgatgatctgctaaaactatatggcttgtttgaatggaaagaacggcatcccgctactctttccggcgggcagaaacaacgactcactctcgcagtatcggattggatagatacccccgttttgattttggatgagcctaccagcggtcttgatttcaaaaatatgatgagaatatcggagcatttgaaagctctggcgcaaaaaggaaagaccattttaatcattacccacgattatgaatttgccgctatgacttgcaatcgggttctgcatttcgttgatgaaggtcatgtagaaacatttccattacaggaaaatttgtcccgcttatactcctgccttatgtgtcaatgaattatgtgtccgattggatagatacgctctgtatggagtggcagaaacaactgaatgattttatgataatagacgggttataaaatgctaacccgtctattattgcgaaaggagacttgcttatggagaagcaaaaaaatggagaactgtccagaatgttcggatatgcagggaaattccatgttttgactgttttaggatgtgttctctccggaatcagtaccattttatctatgctgccttttgtttgcatttggctcgtcatccgcgatttaatccacgcttttgctgccggggatatatctcttgcaacggggagcgcccattatgcgtggatggcggttgtgtttgcagcggcaagtattttaatttattttatcgccctgaactgtactcatctggcggcgtttcgtacagccaccaatatgagaaaatctgcaattcatcatatcgtgacgctgccgttggggtatttcagccaaaatgcaagcggacggctcagaaacatcattgatgataatgcagggcttacagaaggatttctggcccatcagcttcccgatctgaccggagccgcagttatgccggttgccgttattattttgattttcctttttgactggcggctgggaatttgctgcctgatacctatgggaatcagtgtcatctttctcaaacagatgatgggcggagataatgcgcagtttatgggcaagtatatgactgcactggaaacaatgaataaagaagctgtggaatatattcgcggtattcctgttgtaaaagtatttcagcaaactatttattccttcaaaaattttcacgctgcaatagaagaatacgaaaaatttgcttccgggtatgccttaaaatgccgtattcctcttacgggatttacagtaacactgaacggcacatttgttttacttattccagtcgccatgtttattttgtccggggtcagcggccaggcggcttatgaaaatgttgtgctggattttctgttttacagtttgtttactccggtctgtgcaactatgatgaaccgtatcatgtttgccagcgagcagcttatggcggctaaaagtgcagtcagccgggtggatgaaattttgcaggaaaagcccttgaaggagccggaacatcccctgatcccggcagatgcttcgattgtgttttcggatgtttccttcgcctatccaggggccaaagagaaggccttagaccatatcagctttgaggttccggcaggaaaaacagtggcgcttgttggtgcctccggcagcggtaaaagtacagcggcaagccttattccccgattttatgatgttcagtcaggttccgttacgattggcggcgtggatgtacgcaatattgagaagcaggaactgatgaaaagagttgctttcgtgtttcagaatacctgtctgttcaaggacaccttgctgaataatattaaggcggcccgcccggacgctaccagggaagaagtcctgaaagcggctgatgaagcacaatgcaaagatattattgaccgcctcccggatgggcttgatacgctcgttggaacaggaggcacatatctctcaggaggtgaaaatcaaaggattgctcttgcaagggcaattttaaaagacgcccctattattgtactggatgaagccacagcatttgcagatgccgaaaatgaacatcagatacagctcgcttttgagcggctgacccaaaacaaaacggttatgatgattgcccaccggctctctacgatacaagacgcagaccttatcctggtgttcaaggaggggcagattgcagaaagaggtacgcatgaagaattggtagccttaaatggtatttattcttctatgtggaaggattaccagacctcgattgcctggaaggtcggaaaggaggatgagcagcatgattaaggcgttaaaaaagaagtatgcgttaagcgatcagggtgcaaaagacctgttaaaagggatcgtttattcggtgctggccaatatcagccttatgtttcctgttattcttctggctatcgtcctcaatcagcttcttgcgcctgttttgggagcgagtgcgccagagatcagtgccgccgtttacactgtgattggaattgtgattttagctgttgtttttatttttcattattgccagtacaccgcgacatatctcggaacgtatgatgaaagcgcaaggcggcgtatcgggcttgcggaaaaattgcgtacccttccgctgaccttcttccaccagcgtgatcttgctgacctgacaagcacaattatgggcgactgtgcaaactttgaacacgcattttctcatacggttccacaattctttggagcagttatctctacggggattgtttgtatcggcctgctgattttcaactggcaaatgggtttggctcttctttgggtagctccgatttcatttgcaatcgttattctgtcacggaaatggcaggaaaaactcagcaaaaagcacatgaacgcaagactggagcttgcagaaggcattcaggaatgtttggaaaccgtacaggatataaaggcttgcaatcaggaagaagattatcttcgcaaattggacgcaaagatggatgctgcggaaaaagcacagatttcatccgaaatgacaacggcaagtctgctgacaaccggccagatgtttttacggctcggtttggcaacggtgattgtagtaggtaatagtcttgtggtaagtggagatacctctctgtttacctatattctgtttttgattgctgcctcccgcctgtacgatccgctttccggggcgatgtcaaatatggcagagctgttttctgtacagcttcaggtgaaccgcttgaaagaaatagaggaatacccggaagaaaccggcgagaagaatatccatacaaacgggtacgatattacattcgatcatgtccagttttcttacgaaaagggcaaaccggtactgagggatgtttcgtttactgcaaaacagggacaggtcactgcattggttggcccgtccggcggcggcaaaagtacagtcgcaaaactggcagccaaattttatcctctggacggaggaagaatactgttgggcggaaccgatattgctccgctaaattcaaccatgttgatgaaaaacttctctatcgtttttcaagatgttgtgctgtttaataacaccatcatggaaaatattcgtgtcggtaaaaaggacgcaacggatgaagaagtgattgccgcagctaaagcagcgcagtgtgatgaatttatttcaaaattgtcggacggctatcagacggtgatcggagaaaatggttcaacactatctggcggtgagtgccagcgcctttctatcgcacgtgctcttttgaaagacgctcctgttattcttctggatgaagctactgcttctcttgatgtagataacgaaactgaaattcaaaacgcaatatccaggctggtaaaaggcaagacagttcttataatcgctcacagaatgaggacggtggaagctgccgataacatcgttgtattgtcagatggtattgtagccgaaaacggaactcacgaagaacttatgaaagaaaatggcctctatcataggctggtcgatttgcagacagcttctgcaaattggaagttaagcgtttaatcataaaaggaggtactgatgaaacttcatgcgtccggggaggactacctggaggccatacttgttctccataagaagatgggcatggtgcgctccgtggatgtcgcccggcacctggaggtcacaaagcccagcgtgtgccatgcggtggcgaccctgcgggacgggggcttcctgacgatggacagcgactattttctgcacctaaccgacgtggggcgggaagtggcggagcagatctacgaaaagcaccgcttctttaccgaccggctgattgaggccggcgcagacccggaaacggcggaacgggacgcctgccggatggagcatgtcatcagccaggagtccttcgagcatctgaaaaatgcttacaaaacaaaagaataataaactgcccgcatagcaaacgggtgaaacagtaacgcggccgggcacatcgaacccgaccgcgttactcgtctttctgaaaggcttccgcctgtttgcagagcgcgataaatttttcgatctctgcttcgcttttcccggcaaagaagtccacaactgttttcgagactgtctgatttaccatttccgggaagatggcggcgtccacgctgatattcagttctttggcgacaaggaccaccgtttcaaatttcggattactctggcaggtctccaaatctatgattgtgcgggggttcataccgaggcgttcagctaactgcttctgcgtcagatgctggcgcttccgttctgaccgcaccttccatgcaaatagatccagcggattgttcactacacatcacctctacatcattgtagggtgtgcttccgctcatataaataaccatatagctcatgtaaaatgagttataactcatatttcggagtaaagggggatatggatgagagcgccaacacaaaggaggtcaaaataaggcggggtttaccgtttgtacggcggacgcccatgccactacgaaaaatattccaataacgcagcagcgagccatgctcatgaaagtgagttatggctcgctttttatatactgtggctcgtatctcacaaaacccgtttctttgagcgcctgggcgtgggctgccgctccccgccccgtttcgttccggcctgtcaacccgaacgaaacgaaaggagccaattatgagtggcaaaaaattttttcagatagatcccgaaaaccggccaaaccagaccactcgtgaacgagtagtgagcgaaaggggaagaaaagaactgcctcccggcacgaagggaggtgagaacttgaaacctgaccgccactacgagcacaagcagtacgcctttgacagctactgcaagaaggtgctgaaatgcgaggcgtgcaacggctatcgccagatcagccggcaccagaagcgtttcacatctttggaagaaatgtccgaggcagaaatggcccagcttgcggtatatgaccgctacccgtgggaatacacgaccttccctgtgggaggggccgtgatcctgatcgaggacgacgggctggccgaggcgcttctggagctgtcccaggaggaccgggaaatctttatgatgcactggttcctgcggatgaccgacgcacagatcgccaggtacataaacatgccccgccggacggtcaatacccgcaggcataaagcctatcggctgctgacagaactgatgggaggtgaagcggatgactaaatctgcatgcacgcgggcatcgctgattccttacccggtgatcgccgccgctatcggaggcgaccccgaagcggtgaaccgggtagtccggcattactccggctacattgccgcgctgtctacacggacgagctatggccctgacggctatccccgtccccaggtggacgaagatctgcgcggtcggctggaagcaaagctgattatttccatcctggattttgacctgagttgatccagggccgggcgctgcgtgttcccctttccacgcggcgtcccgttatagcaccttgacaaagaaagcccgttgggaggccaacgccgcagtataaggcaaacggatacattcctgtttgtgccgagccatacggccggtgcgccatgacctcgtttcaagtccgcaggacgggaccactgtaacgggcgagcgaacagcaccggaccgcaaagcaggcgtggcggcttgcgggcgatgacacacgggcagggttaaagatactcgcgcattgaacgcccacaaagcattgtgcgccgcacccatcagcatgggccggggttagactcccgtggagctgtgccagcagccgtccgtaagcctacttttcttttttgaaagtttatggatagatcgtaaacttttcaattagcagcagacaaacacggagcagcacggtaaaatgatggtggaagttatattacccacacatattcgtgctgttccttttcataactgaaagggggttctcatgtctcaaacatggaacggcacgaagaaagaaacccctgaaagaaggacgtatacggttgacgatattgctcaaattctgggcatcggaagaacttccgcatatatccttgtaaaagaagggcacttcaaaatcgtgcgaattggtaacgccatacgcatttccaagcggtcatttgacgagtggcttgactccctcgacctgtgatccaagaaaggaagaacgatatggcatctataatcaagcgaaagaaaaactattccgttgtttacaactatgtggatgaaaacggagaaaccaaacagaagtgggaaacctggcatacccacaaagaggctttgaagcgcaaggcggaaatcgaaaatcagcagcacacgggaacttttctcccaccaagcaatcagacgatcaccgaattcctttatgacttcgtatctctttacggagaaaagaaatggggcgtgtccatgtatgacagccaaacggcgctgattgcgaactatatcaatccgatcatcggtgatatggaggtacaggcggttactccccgtgcggttgacggttatatccagaccttgcagaaaaccaagtcggtgtctaccaagacccgaaaggccgttaccacctatgtcagcgacaagaccattgaaaagatcatcaagctcctgcggtgtgcgtttaagcaggcggtacgatgggaaatcattgcaagaaatccctttgacaatgtgatcctcccgaaaacggagtatgcgaaacgagatatctggacagcggatatgatccgccttgccttggacaaatgcacggacagcaaactctatgtagcaatgaacctttcctttgcctgctctctgcgtatgggtgaaatcctggggctgacctgggaaaacgtccatatttccgatgaagatattgcggcggataatgcctatgtctacatcgacaaggagctgacacgggcttccaaacgagcgattgaaacgctgggtgagaaggatatctattacatcttcactccgctcatgccgaacaccagcacaagaattatcctgaaaaagccgaaaactgactccagtatccgtaaggtgtggctgccgaaaacgctggcttacatcctgcgggaatggaagaagtcccaggacgagttgaaaggcttcctgggcgacgagtatcaggacttcgatctggtggtggcacttcccaatggacggccctgcgaggatcggatcatcctcaaagagtttgcaaagctccgtgaggacgcagggctgccgaaggtggtctttcattctctccgtcattccagtaccacttacaaactgaaactgaaccacggcgatctgaaagccacccagggcgatacaggccatgccgagatcgacatgataaccagtatctatgctcacattctggacgaggatagaaaggtcaatgctcagaaattcgagactgccttctatgccaagcctgatcttcgcaacgtccgtccgccggaagaaccggcaaaatcggagcctgcgaccctggaccttgaaagccttgtggagcagcttcagaagtcgccggagctggcgagtgcgctcgcagccctgatagcggcgcaagccccggcaaagtgatccgaaaaatcgaattagcaaaacgtagaattttcttagcaaatttctgaaaagcgttcgagtccaattagcaaatatacatcatgcggcgtataaaaatctctcggtaacagaagcaaaattaccgggagaaggaggaacaaaaaaacgctgcaaaccctgaaaaaaggcttgcagcggtgctttctggcgtcccagagaggatttgaacctccgaccccacgcttaggaggcgtgtgctctatccagctgagctactgagacatttttgagatttatgcaattttcattgctcgaaggaatcgaacaatctgccgcttaggaggcgtgtgctctatccaactgagctactgagacatttataagttttatgcaattttcaaggctcgaaggaatcgaaccatctgccgcttaggaggcggatgctctatccaactgagctactggcgcatatttaatttatgaggcaattacccatctatcggggaacacttttaggttctcttaggagcgtgacctctatccaaccgagttgctgagacgtgttaaattggggtcataaagtgtactgtgttattgtaccgcacggcggcgcatttgtcaatcatattggattttcgcgcactgaaatatacacagaaatagctttgaaaccccatgcaaattttccgcaaaaggcaaggctctgggtggcttttgccttgacgcttttcgctttttcgtctatactgatatatgtatgaaaacttatggaaaccaaacactgcgggcatcgggaaatgtgcctgcacggaaaaaacaaaggattaaggagcccgatacatggtttttgccgatttgttctttatctatgtctttttgccgctgtgcctcatctgttacggcctcgccaaaaagctcagcaccaaaaacatcgtgctgattgtcttttcactcatcttttacgcttggggcgagccgctttggattttgcttttgctgttcagttcattctttaactggttcatcggcatattgatcggtaaatttcgggataccccgcgcgcaaagttagccgttggcggcggtatttttgtagatattctgcttttgctcatctttaagtacagcgcgttcattgtagaaaacctgaacgccgtttcgggcgcggccattcccgtgccgcagatcacgttgcccatcggtatcagcttctacacgtttcaggctatctcctacattttggactgctactgggaaacggtggatgtgcagccgaagtaccacaaattccttttgtacctgtccctcttcccgcagctcatcgccggcccaatcgtgcggtacagcgttgtggagcaggagatcgacaaccgttccgtcaacgcgaccgacctatgcgaaggtgcgctgcgcgtgatcctcggccttgcgaaaaaggtcatcatcgcgaacaatttgtggtccatcgtcaacacgttcttcggcaaggacatcacgggactttccgtgctcggcacatggtacaccatcatcgtgtattcgctgtatgtttactttgacttcagcggttattccgatattgccatcggcctcggtcgcatgtttggcttccactttgacgaaaacttccgtcatccgtttgcctgcaccaccattgcagagttctggcagcgctggcacatctccctcggctccttcttccgcgactaccttttgtacgtgccgttcttcggcaagccgcgcaagtatttcggtctgttccttgtttggttctgcaccggtctttggcacggtgccgcatggaacttcattttatggggcctttactacggctgcttcatgctgttcgagcagaaaatgggcaaaaagcgcatgaaaaagtggccgatcgtgtggaagcacgtgtatacgaagcttgtcatcatcctcggcttcggcatcttctattttgaagatctcggccagcttggtcagtttttcctcaatatcacgggcatcagcatgattgcgaacggcgcgccgtttacggaccccatgacgttctcctccctgcgcaacaacatctttctcattttgttcgcgattctcgtcagcctgccggtattgccgaagatcaagagttattttctcgagagcaaaaacgatatcgtttatgccatcggccgcgtcggctccgttgcggtctgtatggtgttgctcgccgtcgtaagtgttctgctcgtcgacaccacgaacaacgtgttcctgtatttcagattctaaggggaggtgctcattgacatgaacgattttaaagaccttgaccttgattattttgctccccgcaagcccgccgaaccggaagcgaagccggagaaaaccgaagccgtagatgcgccgactgcggatgaaagcgccgaacccgcagagcgccgtcgcaagccgaagccgagccgccgcgagcttttgaacatacggctttccgttttatccgtcggcgttatggtcattcttttcgccctgatgacgctgtatctgctccttttcccccgctccaccgtctcacagattgaaaaccgaaaccttgcggaattcccgaaattctcttttgcatcgtatttttccggctcgtttacggcggacgtcgccacatggtttgacgataccgtgccgaaccacgacggctttaagaatatgagcaactccattaagaacctgtttggtatgaagatgttcgcttcaacggtcagcaccgcaaagcccgagacggacagcacagataacaccgatacttctgccgcaaacggtgacacccagacgaccacacccgcaaacggcaccgtgccaaacaacacgaacctgctgcaatacgccgcagggcgtgtgttcccggccgtgagcgctgcggatgaaaaaatgggccgcgatttcagcaccgaggataacagcacactggaatgggtgaacaacctgcttgtcgtaaactgggataatcactggcgctgcatggaggccttcggcggcggtggcggcgccgcttacgccaatgcgctcaacgacctgcaaagcaagatcggcagcggtgtgaccatttggtctatgcccgcacccaccgcttccgccatctacaccccgaaaaacggcattgattatattggcgaccagaaggaatgctttgacggcgttgccgaaaagctgaatgccggcattcagtccgtaaacgttgtggacgtgatgaaaaagcatgcggaggaagatatttacctgcgcaccgaccaccactggcaggcacgcggcgcctactatgccgctcgcacgtttgccgaggccgcaggcgtgccgttcgcagacctttccacctacacggaagaatccattccgggctatgtaggcactatgtacggtttctcgcaggatacgcgtattttgaacgacccggacgatttccactacttcgtgccggcctcgaactacgtggcttcctactacgatacttcttttaactaccagtacgaagacgacctctttgccgatgtggacaccgcaaacgcgtacctcaagttcctcggcggcgactcctgcatcgtaaaagtcgatacgcagatgaaaaacggccgcaagctgctcgtcattaaggacagcttcggtaacgcggagattccgttctacacgaattcctttgagcagatctacgttgccgacgtgcgctatttggagtgcaacctcgtcagcttcatcaaagatatgggcatcacggatgtgctctttacgatgtccgcatactccgttgtgggcgataacgccgacaacattcagaacctcatcgcgcagaacgccggtgagaccatcaccgattcgcacattgtcccgtctgttacgccgaaaacggtcatgccgaccgcgacaagtgcaccaacgacgacttccggcacggatacggccgctaacaccacctcgaccggtacagatgatacctcttccgcaaaagaataacaaaggagagcctatgaaagaactggaatatccctttgacgccgcttacatcatcaaaaagcgcaaatctttaaagaaagcactgctcgcagacggcacctcgcgcatcagaaagaagattgccgtgttcggcggctccaccacaagcgacattgtaaaaacgctggagcttttcctcttagacgccggtattgagccggaattttacgaatccgaatacgcgcagtattttcaggacgccatgttcccggatgaaacacttttaagcttcaagccggacattgtgttcatccacaccacgaatcgcaacgtgacggactggcccgagatgaccgacaccacggagcaaatagacgaaaagctgcacacggaaataaaccgtttcacggcgatgtggaaaagtattgcagaaaagttccactgccccatcattcaaaataactttgaaatgccgctttaccgcctgctcggcagccgcgacgcgtgggacatccacggccgcacgaatttcctcacgcgcttaaacgaagctttttacgcctacgcacgcgaaaatgagagcttttatattcacgacctcaactttgtttctgccgattacggcctgaaagaatggtcgaacccgctgttctggaacatgtacaaatacgccatgtgctttgaggcgatcccgtcctttgcgttcagtgtttcgcacattatcaagtcgattttcggcaagaataaaaaggcgcttgcccttgacctcgataacaccctgtggggcggcgttgtgggcgacgacggcgtagacggcatcgagatcggacaggagaccggcgtttcgcaatcctactacgagtttcagacatacgtaaagcagcttaaaagtctcggcattgtgttgacggtctgctctaaaaatgaccatgaaaacgccattgcggggttaaaccaccccgaaggtgcactgcgcccggacgatttcgtcatcattaaggcaaactgggaaaacaaagatcgcaacattgccgagaccgccgcagagctgaacattctgccggattccatcgtttttgcggatgataaccccgccgagcgcgagatcgtgcgcacgcagatcaagggcgcggccgtgccggacatggacggcgtggaaaactacatcacgacgattgaccgcagcggcttctttgaagtgacaaccttcagcgaagatgacttgaagcgcaacgaaatgtacaagaaaaacgccctgcgcgccgcggaaatggcgtcgttcggcgattataacgactatttaaagagccttgagatgcacgccgtcatcgatgatttcatcccggtgtaccttgcgcgcatcacacagcttacaaacaagagcaaccagttcaacgtgaccacccgccgctatacgcccgccgaaatggaaagcgtatttgaggacgacggctatatccgtctgtacggcaagctcatcgacaaattcggcgacaacggcatcgtttccgtcgtcatcggcagaaaaaacggcacggcactcgacattgacctgtggctgatgagctgccgcgtgttaaagcgcgatatggaatttgccatgttggaccgccttgtggagcgctgccgcgaagtgggcgtagagacgattaacggctactactaccccaccgcaaaaaacaagatggtcagcgaccttttcggtcgcttcggcttcacgaagactgaggagcacgaggacggcagcaccgtgtggcagttgcgcgtcgcggactacaagccgcagaaccacgtgatcgaagtgttcggcaacgaccacgcagaagcgtgatcctcgctaaattaagtattaaatcaaatcacagaaaggaattttaccatggacacaagagaaatttttgaaagactggaccgcgtatttcaggatgtttttgacgatgacaccattcacgtcacaccgaaaacgaccgcagacgacatcgaggattgggacagtctggagcacatcacgctgatctccgctgtagagcgcgagttccgcatgaagttcaagatgggcgaaatctcctccatgaagaacgtcggcgaaatggcttccatcatcgcagcacgcgcaaagggctgatcttaccgcaaaagaaaatgccgcagacaaccgggttttcccgtgcctgcggcatttttatatttacggttatttataacggttcatgaagtcgaggtaatcgtcctccagcgtgcgcttcggttcttccttacgcggagcggtgtacgggtcagccgtttcctgctcggcggcacggcggcgctgttccgcacgtctgcggcgcgcttcgcggcgctttttgcgcacgcgctgcccgtggatgtacacgataagcagcaacaccgcaaagacaatgacaagcaccaaaacaaatttcaaaatgccgaaaatcgccgagccgcccttagggccgctcgcttcggaggatgcactgctttcggccgcggaagattccgtaccgccggcggtggactctgcgttgcttgcagtgcccacagccgccgagtctgtggggttgccggatttatacgtttccgctgccgctgccacggcgttaaagagctttaaaacaccggcatcatatgcgccggtctgaaaatccgcttccagattatcgtgcagcaaagcgctcaactccgtgccggagaacgcgccgtgcaggccgtcaccggccaccgccatatagtcgccgtccgaaacggaaaggcctatgataagcccgtttttgctgtcgccgccaagcttccatgtgtccatgacctttttaaggtaggccacgcggccatcgtaatcggatttttcgccgggcaaagtgttcatggtgaacaccgcaatctgcacaccatacgtcgcattgaggtcagcgtttttatcgttgattaccgttttcgtactggcggaaatcacactcgcttcgtcatagacataaagatccgcgggctgctccggcacttcggcgtccgctgccgtcgcgcttacggtgctgcccgtgtcgcctccgtcttcggcagacgaggtgctcgtgtcgccgtttccggcttcatccgcaaacgcatacaggttgccggtggaaaacaccatcaaaaccacaaggcatatcgccgcaaagcgtcccatacccgctttatatagatttttcatccaatccctgcctttcggcagcccggctgtgcccggccgcgtaaaataataccgcacaaaacctgtttcgtagttttatgcggtatcggttctgttgtacctattttaagagaatttttcgctgctgtcaagtaaagccaagactttgcatcttacgatcctcttaaggttatttcagctctacaatcgtcacgccgctttcgccctcaccatatacgccgaggcgaaaggatttcacggccttgtggcggcgcaaatgctgctgaatgccgtttctcaatatacctgtacctttgccgtggataatcgtcagcatgttgagattgtgcatcaaagcgtggtcgataaacgcatccacttccatgagcgcttcttccaaattcatgccgcgcacatccacttcattgcgcgccggagcggaatccatcttcttcgtcacggtgcggtgaccgcctgcggctttcttcttttccttcggcttctggtcggtcaggcgcaggtttttcagcggcacgcgcgttttgataatgcctgcctgcaccaaaatctggtcaccgtttttcggcacatccaaaacggtcgcaatcttatcgatgtcgtaaatcagtaccgtatcgccgacctgtaaggggcgcggcaacacataatcttcgtctatgcggcgctcgtgcaccgggtcgctgaccttttccatatcgcggatgcctgccttcaggcgcgctttctgctctgcggtcaataatttctgcttgttgcggcgcaggtcttcgagctcgtctaacaggctctgggcttcgcggcgcgttttctgcacaagctccgccgcttccattctggcgcgctcaatttcgtgcttcgcgtccttttcggcgcggtcgcgcagcgcttcagcctctttttccatgttctgcgctttcaaacgcagctgctcggcactttcacgctcatcttccattttgcggcggctctcctccaagcgggagacgacctcctcaaacatagtgctttcatcggaaacgagttcctttgcgtgctctacgatgttcgccggcataccgagacgtgcggaaatggcaaatgcgttggaacgacccggtacgccgatgagcaggcgatacgtcgggcgcagcgtcgccacgtcaaattcgcagcaggcgttttcaacgccaacggtctgaatggcatatgccttcagctctgcgtaatgcgttgtcgccatcacgcgcgtgcctttggtgcgcatggcttcgatgatggaaatagcaagcgcggcgccctcgaccgggtcggtgcccgcaccgagctcatcgattaggataagactcttgtcgtccgcaatgttgagaatgcggatgatattcgtcatgtgcgccgagaacgtggagagagactgctcaatgctctgctcatcgccgatgtccgccaaaacgtggtcgaaaatcgaaacttcgctgccatccgccgcggggatcatcaggccgcacatggtcatcagcgtcaaaaggcccgccgttttcagcgagacggtcttgccgccggtgttcgggccggtgacgatgagcgcatcaaaatcactgccgaggtacagatcggtcggcacgaccttatttttatcgatgagcgggtggcgcgccgatttgatggcgatgcgcccctcctgattgagcttcggcacggtcgccttcattttgtaggcgagctgcccttttgcgaaaatgagattcagctccaccgctgcgcggtagctctggatgatgctgtccgcaaactcgccgatctcacgggaaagctccgtcaagatgcggtcgatctcgtccttttcgtccgagcgcaacacgcggatttcgttgtttgcctccacaacgccgatcggctcaataaatacggtggcaccactgccggaggaatcgtgaatgaggcccttgacttcattgcggaactccgccttaaccggcacaacgtagcggccgccgcgttgggtaacaatggcctcctgcaaatacttttggtaggtctgcgagcggatcattttatcaagctgctcgcgcacgcgcagcgatgccgcgcggatcttgcggcggatagccgccaaggcgacgcttgcggtatcggcaacttcttcctcgctgacgacggtcatcgagatgcggtcttcgataaacttattcggctgcaaggtctcgaagcggtaatcgagcgccgttttgacgctttcgctttttttacgccaatccgaaacactgcggatagcacgcaatgtcgcggcaacagacaataattccgccagattcagcacgccgcccgcttctgcgcgacgcagcgcattcgtgacattcgtcatgccgtaaaacgacggtgcgccgtactttgccattaaaacaaacgcgtcgtccgtttcctgcaaaaggcgctccacgtggcgaatgtcggtatccggctcaattttctgcgccagctccgccgcatccgggcaagtggtttcatttgcaagctgaagcagaattttatccagctccagcgctttatgatctttcagcattttgttcctgctttcttttcgtacccggttttgccgggtcaatctcctctgttaatccaaaaacgttttataaaactccaaggtcttcggtacggtatgtaatgtatggacaacgtagctttccgttgcggcgttcagaattttcagcgcatcctccggcagcgagaagttatagagcttctcaaaatccacatacgcaatgtgtcgcatggcggtcagcacgcccggcggcagcgcgacatacggttcattcgcgccgtgaaagcacttgtcgcacagaataatgcccctttgcggcagaaagaacatcgtttccgcctcatacgcggcgcagttttcgcacgcaactaaatttggcatatagcccgccgacgagagcatacgcagctctgtcacagactgcaacagccgtatcggccgcgtgccctttgataaaaaatgcagggaatttaagatgagccgcaggtattcctcggaatccgtatcctccggcaccattaagtacgccagctcacagaaatactgcgccagcgaaagcgcggcgatgtcccgccgaagcccgaaaaagacctcgatcggctcggcatcgtcaatcatgtatttttcccgccccttaaaaatagaaaggcgggaatagcacaaaagctgcgttgcggcgcttttgctgtcctttaaatttttggcgcggcgtgcaaacgcacgcaccacgcccgcgtcacgcgtcagcaccgtgacaaggcggtcgctctcgcccaccgtctgctcccgaatgatgagtccctgggtctttacctgcatcaaagtctcctgccgtaaaatccacgtcggcaagctcccggcgtgtaagctgcacgtagcggatgtaatcctccgccttgccgcttttataaaagctgttccacgcggcatacgccgcattctgcatcggggaatttcgcatacaaacgcctcctaaaccgtatggctgtttttagcttctgcggtttttgcgggttttatccgtggaaacgtctgtcaatttctcaaaatgtgaccgttttcccgaaaatcacggtttattggtactggtcaaaatcgtgctcgttaaagccgagctttgtgaggatctgcgggcgctggcgccagtcctccttcacctttacccaaaggcgcaggttgatcttgcagccgaaaaagcgctccatgtcttctcttgccttcgagccgatttttttcagcattgcgccgcccttgccgatgatgatgcccttgtgcgtggcgcgttcgcaatagattgttgcatcgatctccgtcaggttgccgaggtcgcgcatgctttccgtcacgactgcaacgccgtgcggaatctctttatccgtaaaacgcagaattttctcgcgcacgatttcggacgcaatgacgcgctccggctggtctgtgagcgtatcttccgagaagaagtgtccgcccggctccgccagtgcgatgagctcctcacgcagcgcgtccataccgttgccgtcctgcgcggagaccggcaccacagcttcaaagtcgtagagcgcggagagcttcgcaatctgctccatcaaaacgcttttgtcctgcaaaaggtcaatcttattgatggcgagcagcgccggcacacctaaatctttaaagcggtgcacaagctcttcatctgctttggagattttcgtgtttgcctccacaacgagcaggcaggcgtccacatctgcgacggacgaggtaacgcttttcaccatgtaatcgccgagggagttcttcggcttgatgaggcccggcgtatcgatgaacaccagctgcgtttcgccctctgtccacacgcccataatgcgcgtgcgggtggtctgtggcttattggaaacgatggcaagcttcgtaccgagcaggcggttcaaaatagaggatttgcccacgttcggtctgcccacaatggcgataaacgccgatttttcgttcatgtagttttctgtatccatagttttcccggggcacgcagccgcggtttcctttctgataatttatatcactttttatgaagcttttcccgcacgctgcatggcactttgaaaatgaagaaaaaggccaaaatgagcgacagaatgaaaagcacaaggtaaagcggatttgtgacgattgttatcaaaagcgctaagattgcttctggacgccacaaaacggctataccgacaaaagcggcaaaaacggcgcacacaagcaccgctcccgccgcgatatcttttgttttgccgatgagcggattatagcttttctgcgcgtaatcacacagcatctcaatggcggtgttgaacgcctccgccgcgataaccattgcgatggtcaaaagcagaacgccgtattcgctgcgcgtcacgcccagaaagggcgaaaaaaacaaaacgtataccgccgctgtaaggtgtatacgcatgtttcgctccgttttcacggtatggaaaaatccgcgcgcggcatcgcgaaagctgtccgcctgcgtgcgggtcttaccgtttgttttccaatccggcaccatgttaaacggtgtagctggaagtgcccggcaggccgagctgcgacataacgtattcttctttttcacgcatgcgcacacgctccatgccgccgttttcgtggtcatagccgagcaggtgcagcatagaatgcgccgtcaggtagccgatctcgcgctctaagctgtggccgtagcgctttgcctgtgccattgccatttccacggagagcacaatgtcgccgagaatcttcgcgccagtatcgtggttgatgtcatacacgccgttctcacccatggggaaagagagcacgtctgttgcggcatctttgttgcggtactgcgcgtttagctcgcgaatctgctcgttatccacgaatgtcacgctgatttcagcggaatcctcaaacttctccatccgcagaaccgcgtggcaacagcgacggatgagcatgcgcacgccggtcggcactttgaccgctttctggttgtttgtgatgatgactctgattttttccatatgctaaaatcctttcgataggggttattttgctgcggacgctttttcatacgcccgaatgatatcctgcaccaagcgatggcgcacaacgtctttttcggtaaagcggaaaacggaaatgtcatccacattgcgcagcacacgcatcgcatccttcaggcccgagcgtctgccgtccggcagatcaatctgcgtgatgtcgcctgtgatgaccattttggagttgaagccgagacgcgtcaggaacattttcatctgctcgcaggtggtgttctgcgcctcatccagaatgataaagctgtcgtcgagcgttctgccgcgcatgtacgcaagcggcgccacctcaatgctgccgcgctccacaaggcgggcatacgattccgcgccgagcatgtcgaacagcgcatcgtaaagcgggcgcaggtaggggtctaccttctgttgcaaatcaccgggcagaaaacccagcttctcgccggcttccacggcggggcgcgtcaagatgatgcggttcacctgctgcgcacggaacgccgtcacagccatggcgaccgcaaggtacgttttaccggtgcccgcagggccgacgccgatggtgatggtgttattgcgaatattgtcgcaataattcttctgtcccaccgttttgggctttacgggcttgcctttcgccgtgatgcagatgcagccgtccgtaagcggcgccatctgtgcttcgctgtcctccataaccatgtcgatgcagtagccgacgttctggtcgtttaggacttcgcctttttcgacgagccgcaaaaggctttctgccgcacgcaccgcacgcgaaacaccgggttcttcgccgatgacgtggatctgcgaatcgcggcaggaaaacgttacaccgaatgccttttccagtcgctttgcgttcacgtcaaagctgccgaaaagctctgccgcgtattctgctttgtctacatgaatgcttctttccaaatcgttctccttttgccgcacggctttaaaaaaccgtgcagtctaaaaaaccgaatttcctgttttattatagcataagtgttcccaatgtggttatgaaattttcaacgaaatttagccgtttccctgtacatttccgacaaatacccctataatctccgaattttcaggctcttcaggcagggtgagcggcgcctcctgcgcaatgttttcgagacatacgcaccgggacgtgacgtaaaccgcgccgttttttgtctgatatgtgatgttttccgtaagcacacgcccgtcttctccaagcgcaagcttttgcagctgatgcagattttcaagcgcgcggcgctgcgcttcttcctccgtgaacgtaacgggcacggtttcctcctcatatacgcgcaccgtttccacccacagcggcaacgtgtgcccctgcaaaacgaacggcgtgcgggtgtatgccgtctggcctttcggcgcgccggaaagcgagagcggcacgcgcacgcccaaaatatacagcgcgcgctgtgtaccgaggtccgtttcacgcaccgttccggtactaagcggacaggatgccgtgaatgtgcgctgtgtctccgccagaatttccgcacgggcgcgggtgtaaaaacagcgcacggggttgtattccgggtcatacgggtcgcccacctgtgtgatgccggaaacaagcacctgccccgcggcgcaggcagaaccgactttcacgagcaccgtgccgttttgcgccgtgattgaatggatgagccccgcgcgtgacgcgacgatgtcccccgtgccgtcgtgctccgcgccctccgcctttgtgacggacgtgcgcagctcaagctgtacggtgcacccctccgtgttgaacgatgcccacgaaagctccggcagctcctccaaaagcgcgacagaggccaaagcggtatcggtgcttcgcggcgcgccgatatacacgccaacgcgctttgctgccgctaaaatttcgctttcggcatacggaatatcttcaccggagatcgtcatctcccagtaaaagccggaaaggaacagcatcagcgccacgccgagcgccgtgccaagcaaaagtcccggtcggcgcagcatgcggcggaaccgaaacgggaagccgcttttctccgcaagcttcacccgcgcgtgcgtgcgttgtttgatcttatgcagctttttgtagtccttcgcatacaaggtgaaaagcacgtctttcccatccttttgaagtcgaatggggcgcagacccgttttcaccgcaatgtttataaaccgtgccgtatcgcccgaaacacgcgccgttgccgtgccgagcacccaatgcgtgattttcttcatgcgaacctcaccgcctcaatatgtcccgtgatcaccgcgccgtcctcttcaagacacaaaagccgtaagcttttcccctcaacccacacggcgcgccgcccgcagcgcaggccgatcttttccgtttcgtattcgattacgccgtcacaaccctctaaaataagcttcgccgtgccgagaatctccgtgcggatcgtgccgtcctgcatggcatagcgcagcttatctgcaagctcacccatgcacccaccctctttctttttactcctctatacgtatgtgcggaaaaacacgcatatactttttcaaaaggagggttcaccgtgtcgaagcatacagaacacatcgcttttttcattcgccaaaaattgcagcttccggcgctttatatccgcgccgccgcgcttttactgctcgccttgctcctgctcaggcaccgcaccgctgccgccgcaggcgttgtcagcggcatccacacatgcctcggcacgctgattccctcgctgttcccgtttattttactcgcgtgcctgtgcacgaacagccgcgcggcgcaggtgctgtttcgcccgctttcccccgtaatgcgtcatgtgttccgcctacccgcctgcgccgctcctgccgttttgttggggctcaccgcaggctaccctaccggcgcgaagatcaccgcaaatttatatgcggccggaaagctcacaagagaacaggcggcgcggctgttatgcttctgtaccgcgccgggctatgcgtttgcgacagcctatacgggcggtttattattaagaagcgaccgcatcgggctgaatttattttttgcctgcgcacttgcgccgttacttctgggactcaccctgtcgcgctttgccgaaaaacccgaaaaaagcctaaaatcgccagaatctgctccaggcggcatcgtctccgctgtgcaggacggcattaaggccaccgtttccctctgcgggttcgtccttgtgttttccatgcttttggccgttttgcacgatgccggcatttttcagtttttatgcggttttctctcccgctttgggctcaccgtgccgctttccggcgcattgctgacgatgggtctggagatcaccgccggagtctcgcagtgcgtatattggcacctgccggtttattttttagcgttcgggctcggcttttccggcgtttgcatccacttgcagatcttctcctttttccacaaagcggggctgccgctgtcgaaaacgagatatgttctcgcacgctttttaaacggtctgctttccgctgcattttatttgctgctttcctattttctcccggcaaacacctcggttgccgtggaaacctcgcccctcaacaccgcgcccatagcgggcaacgcggcatcatccttggcgctcatcgcgctgtctgtgttctttcttctcacgtgtattctccgcagcggaaaaacaccgtcgaaaatttgtggtggaaattccaccgggaaaatgctacaatgagaacaactctaagagcaacctgaaaatcggaggcgacgaaagtgttcggacgcaaaaagaaaaaacaaacacccgctctgtttggcagccgcattgagccggactgcgcttactgcgcgtttcatgcggacggtgtacagaaaaaatgtcttgcggggcagctcggtggagagcactgcgcaaaatttcaatatgacccgctgcgccgcgagccgaaaagcgaacaaaagctcgggcaatacagcgccgaggaattcaaactatgaaaacttatcttaaagcgtttcgtttaaagcgcttttggctgctgcttttgctgcctgcggcgttccttttggacttcgccgcacggcagagcgcagattttgccgagtggtatgccgtgacgatctaccccgtgtacgcgcagttcttttccgccattacgggcgtcttcccgttttctgtcggcgaattttgtctgatcgcgcttgtccttttcattttggcgtatctcattcacggcgtttataaactcattcgtcataaagagggccgttttgcgtactttgtgcggtttttgtcggttcccgttctcatcgccacgtgcatcgcgtttttgtgcgtaacgaactacggcacgaaccaccgccggtacagctttgccgccgtcagcggacttaccgtgcgggagtcctccgccgaggagctttacgatgtgtgcgcgtatttaatcaacgaagcgaacacattgcgcgaaaacctgcccgaagacgaaaacggtgtatttcagctttcaaacgatgtttttctcgatgcagacgaagcaaaatcatcattcaacagccttcatgatacgtattccacgctctacacaaacggcaaaccgaagcccgtgctgttctcggaagtgatgtcgtaccttgacatcagcggcatttactgtccgttcacgtttgaagcgaacgtcaacgtccacatgaacgacgtattgatccccgtgacgatgtgccacgagctctcacacctttccggctacatgcgcgaggacgaagcgaatttcatcgcatttttggcatgcctgcaaagtgacgacccggaattccgttacagcggtgtgtatttggcgtccgtccacgcgatgaatgctttgctcactgtggacagcgacctgtggaaccgggcggacgctttaaaaagcgacgcactgcgccgcgacattcggtcaaataatgcgtactggaagcagtacgaaacgcccgtttccgaggtctccgaccgcgtgaacgacgcgtatttaaaagccaacgggcaggaaaatggtctgcgctcttacggcagaatggtcgatctgcttctcgcctactaccgcgacgagctgcaatagacatagtttttttgggggagttctttatgtgtgaaaaaatcattgcggcgtgtggaaacaactgcgcggtatgtccgcgctacaacgtgccgccgtacaccaaaaccacagaagaactgcaccacaccgccgagctgtggtataaaatcggctaccgcgaccacgtggtgacaaacgaggagattgcctgtaccggctgcaaggaagaaaactggtgccgctatcgccttgtaaaatgcgtgaacgaaaagcacatcgcgcattgcggccaatgtgaaaactacccgtgcgacgtcatgaaagcgtgcttcacggtgacaggctcgttcatccccacctgtaaaaaagtctgcacacccgaggatttcgagacattgcgcaaagcatttttcgagaaagaaaagaacctgacgcaaaattaagacgacaaaaggcctttgcaccgtccaagacggagatgcaaaggcctttttatgtacgattatttattcgcattcatctcgcggacttctcttaaaatgtcctcaaggtcatatttatcgggcgctttcggcgcggcaggctttgcctgcactgtctgtgcagccggcttcgggggatttgccgggcgctgctgcacgggcttcggcgcaggtgcggcgggctttgcagctctcggtgcgacgctttgccgtggcgcgcgattcactgaggtctgcaccgcagcgcggcgcacgttctgtggctgcatggagaccggcgtttccggcatgatggggcgttctgcggtgtactccgccgacaccggcatcaccggcagctcgccggtatctttatccgggtcaaaggacgtgggcacgcgggactctggctcacggcgcgcctgcatctgctcgcggcgcatgcgctcttcttcgcgtcttctgcggttgcgtcgttcctcctgctcaatctcatccagcacctcggcgcggtccgcttcgccgctgtcgcggttacggcttgcacgctgccacaaaatgatgctgacaattccgccgacgccgagcacgatgcacaccgcacccgcaatgaacagcgtgcggccgacgccgttatcggccttcagctcattaaagaacgattccgctccgctgctgtcttcgcctgcggtgtcggtcgtgccttccgtagtgtccaccgtttcggtgctgtctgcggtatcggccgtatcggcttcatccgcaaaggtaagcggcgcacacagcgcagcgccgagtaaaaccgccgctaaaacagcaaatatacgtttagaaaaagtatttctcataatccatttcctctttcgtgataacttttatgtgccacgatttcgaattcatttttatttagtttagcatattttgcatggtgtttcaacggcaaaataaacaaacccgccgcttctctgcacggttcatgcagtcgaaacggcgggtgctgtgtctatttatatttctttagaaatcgatcttctctgcaatgtacgcttcaagctcgtcgatcttcacacgctcctgctccatgctgtcacggtcgcgaacggtaacacagccgtcattttcactgtcaaagtcatacgtgatgcagaacggcgtgccgatctcatcctggcggcgatagcgcttgccgatggaacccgtatcgtcaaagtcaacagaaaacttctttgcgagcgcatcgtaaacctcgccggccttttcgctcagcttcttggagagcggcagaatcgctgccttaaacggtgccagtgccgggtgcagacgcagtacaacgcgcacgtccggcttttcttcggtgccgaggttttcttcgtcgtaagcgtcgcacaggaacgccagcgctacgcggtccgcgccgagagacggctcgacgacatacggcacatagcgggtgttcgtctccgggtcgaaataggagaggtccttgccggaatgctcctgatggcgggtgaggtcatagtccgtgcggtctgcaatgccccaaagctcgccccagccgaacgggaacagatactcaatatccgtcgtcgccttggagtagaaggagagctccttctggctgtggtcgcgcaggcggatgttcgcttcgtccagaccgaggttcaaaagccagtttttgcagaaatccttccagtagtagaaccagtcgagatccgtgcccggcttgcagaagaattcgcactccatctgctcaaactcgcgaatgcggaaaatgaagttgcccggggtaatctcatttctgaagctcttacccacctgacaaacgccgaacggcaccttcttgcgcgtggtgcgctgaatgctcgggaagttgacaaaaatgccctgtgcagtctccgggcggaggtacagctggctctttgcgtcttccgtaacaccctggaacgtcttgaacatcaggttgaactggcggatatccgtaaagttgtggccgccgcactccgggcaggcaatgttgttgtcggcgatgaacttctgcatctgctcgttcgtccagccgtctgcggattcgccggtaaagtcttcaatgagcttatcggcacggtgacgggtcttgcagtccttgcagtccatcagcgggtcggagaagccgcccacgtggccggttgccacccagacttccgggttcatgaggattgcggaatccagcgccacgttgtagcggctctcctgcacgaacttgcgtttccacgcgttttttacgttgtccttgaaaaggcagcccagcgggccgtagtcccaagagttggacagaccgccgtaaatttcggagccggggtatacgtagcctctgtttttgcagagcgccacgattttttccatggtcttttcttcgggcttcagaactttcttcatttgttaaactcctttcgcgccgctggctgctgcacggcttcgtgcagctggatgctgcgcttgtgatttatccatcataccacgtttttcaaagatacacaactaccgcggcgggattttatgcgaaaaaagcggcactccgcagagcaccgcccgaaatttccgcttgtttagatttattcgccctcgtccgcgatgagctttttcatctgcggcagacggaacagaataaccgccgcgataactgtaaagatgagctccggcagcatgtaagtgccgttgtagcagaaggagtaaagccacgggtggcccacccaggaagcgccgaacgccacaaactcatcaaagtttgcaaagataatggcgccggaaatgaaatggcacacaaagcgcagcgcaacagccagcgccgtgccgcagcaaatgcctacataacccttcttgcggaaaatgcccgcaatgccgataaccgtgtatgccacgatgtaatcgagcaaaatcgtgccgatgagagcagaaggcgtcatgccccagccgaggatgccgtccatcgtgatgccgaacgcaagctgaacgacggattccacaaaggaagccgcaaagccccacttaaggccgtacatgatggaaatcatggcgcagggcagcatggaaagcagcgtgatagaaccgccaaacggcatctgaagcaccttgatcatgctgagcacagcgcccagtgcgaccataaccgcgcaggccgcaagcttttttgtattgttgttcttcatagttcattcctccggttttctaccgagatttaggggataaagcggagaaaacaaaaaccgcgcacccattcggcacgcggcataaaaagcacttaaaataagcgtattttcctacgtcggcattatccgaatcaggtaacaggtttcggcgttcacgccgctctcagccgactttatacgtcagcacccttttttcacattcagtatagcacggaacttttcgcttttcaaccaaaatttgtgttttcgggcagaaaacaaggcttttcttgattttggagaaacaaaatgatagtataaaagaaacataagccaacggcaacggtggttaaaagttttgcttaagctttttcaagaagcttaaagcgaacgtgtgcgttcgcttgggttcattagggcagcgccctgtgtcgtcgtccgcagacgacgacacaccttttgcctaacaaaaatcaggatgagaaccacaacagtcaggtggactgttgtggtgtgggagacacaattagggggtctcccaatgaatttgcaagacaaattcataaaataaaccgctaaaaccgatttaaactacggaaggacatataaaaatggaaagcacacagaacaaaacgcgctgtccgcacagcaaaaagtgcggcggctgccaactgcagaacctcgattataaggaacagctcgcgcacaaggagcgcacgtgcatccgcctgctcggcaaattctgccgcgtagagcccatcatcggcatggagaacccctaccactaccgcaacaaggtacaggccgcattcggcaccacgcgtgccggacgcatcatctccggcatttaccagagcagcacgcacaacatcgtcgccgtggacagctgcatgacggaagacgaaattgccgaccgcatcatcgtcgatatccgccgcctgctgcgcgatttcaaaatgacaacgtataacgaagtcaccgggcgcggctttctgcgccatgtgctcgtcaagcgcggcttccagaccggcgaagtcatggttgtgctcgtcaccggtacgccgatcttccccgcgcgcaacaatttcacccgtgcgctgttaaagcttcacccggagattaccacaatcattcaaaatgtcaacgaccgctacacctccatgctgcttggacagaacgagaaaacactctacggccccggctatatcacggatattctctgcgggctgcgcttccgcatttcggcaaaatcattctaccagatcaaccccgtgcagaccgaggtgctgtacggcaaagcgatggaatttgcggagctcacgggcaaagaaaccgtcattgacgcgtactgcggcatcggcaccatcggcatggtcgccgccaaaaaagccggacaggtcctcggcgtagaagtgaaccgcgacgccgtgcgcgatgcccgtgaaaacgcaaaattaaaccgcgtgaaaaatatccgcttcgtctgcgccgatgcaggcgacttcatggtagatatggcaaacgccggtgaacactgcgacgtgcttttcatggatccgccgcgcgccggcagcgacaccgcgtttctctcctgcgcgctcacacttgcaccgagacgcatcgtatacgtctcttgtaacccggaaacgctcgcgcgcgaccttaattttctcacaaagcgcggctatcgcgccgaaaagattcaacccgtagacatgttcccccacaccgaccatgtagaatgcgtcgtacggttggataagatggattaaaacaaaagaaggctttcccatgattcgccccgttaccgaaaaggatattcccgcctgcggatatttgcaaattccgctcccaaaaattacggaagaaaggtaaaaaatatggcttccagtctcatgcactacgcgatcacggataaaattttgcaactgtttcctatgcacgacggtgcgcggctgcgctttggcgcggtactgccggacgcttccgtaaacaagcggaaaacacattttcgcatttacaatgaaaagctcggcattcggctttatgatcttgaagcgtaccgcgcgcagttcggcgagcgtatgcaaaaagacgacctttacctcggctactatctgcacctcatcgaggatgctttgtaccgcaaaacactgtacgataccttcggctggaatccctacacgccggaaagcaccgcgcgcatgcaccacgattacacgcttttaaaccgtcatttcattcaaaaatataatattcgggatgaccttgccgtcccggaaaatttcacgcaggaaccgattttcgcttttgagccgtttgacgccgaaggtcttctgcgttcgattcatcaaaactttgtgcccgcgccggcggatgtcccctactttttcacggctgccatggcggatacgtacattgaagacgccgtgcggctgtgcaccgcggagcttgaccgctttcacagcggcaaaacgcttctttccgccaaggatttcacctggacgccgccggaaaacaataagaatttctgaataaaagcaaaaacaccctcccgaagtgatggatatgtaccctatataggaagcatatccatgaccgacacgggagggtttcttgatttctctttggaaagcagcttcgcggggcagaccgctttcctatgcgcattcggaattgacattcccgttccgcttcggtacaatagaatcaacaagaacctcgggggacaaaacagtatgaattttctggaagaacgtatcgtaaaggacggcgttgtaaaagccggcaatatattgaaagtagacagctttttaaaccaccaaatggatgtgcgcctgtttcgccaaatgggcaaagagttcaagcgacgttttgcagataagcccatcaacaaaattctgacgattgaagcctccggcatcggtattgcatgtgtggcggcggaatgctttgacgtgccggtcgtcttcgcgaaaaagagccagagtgtgaatattgatggtgacgtatacgtttccgaagtggaatccttcacgcataagcgtgtgaatcgcgtgatcgtttcgaaaaaatttctcggccccgaggatcacattcttatcatcgatgattttcttgcaaacggctgcgcgctgcagggactcatctctattgtagatcaggcgggcggcacggtggaaggcatcggtatcgcgattgaaaaggggttccagcccggcggcgcgaaaattcgcgagatgggctacccgctcgaatcgctcgccattgtggaaagcatggacgacgcaaccggcacggtcgttttccgtccacagccataaaaggagttttgtatgagacggtttttatcccgcgtttttccccttttgctcagcttcggcttgatttttaactgcacaggatgcagcacggttttggtcttagccggtaaagctcgtgaaaacagcgaagcttcgtcctccgtaatttcggaaagctccgcgtcctccggcgtcatctccacccctgtgccgaccgaagacggcgacctgcgtgcgttttacacggatgttgcaaacgctgaaagtgtcacggtaatggtgtacatgatcggctccgacttagagagtgaggacggctccgcgaccgacgaccttttggaaatggcagatgccgcgctttccgaaaacattcaccttgtactccagaccggcggcaccgaaacctggtggaacgatgtctgcacagacgatgaaagtgagcgctttgtgatcgaaaacggcaatatgacgctgctccaaagccttggcagcgtgaatatgacggacgccgacacgctctctgatttcattcgcttctccgccgaaagctaccccgcagaccgctacgagctcattttgtgggatcatggcggcggcaccatgacaggcttcggctacgacgagctgtacgaagacacctctttgacactctcttctctttctacagcgctgtataacggcggcgtgcagtttgatttcatcggctttgacgcctgcctgatggcgacggcagaggtggcctacgccttggatccgtatgcggattacctcatcgcctccgaagaatccgagcccggcgagggctgggcgtacaaaaactggcttacgatgctggcggaagaccccgccgtacccacggcggagctcggcaaaaaactggcggacgatttccttgaggcctatattttcgccgacatgccgacgctttccgttttagacctgcgctatgtgccggaattatacgccgcgttggaaagctactggggaagcgcctacaccgcattgcaaagcggcagctacggtgcgttttcgcaggtacgcagcaacgtgcgggaattcggcgacaacgaatacgaccaggtcgatctttccgacctcgccacgctgacaaagcagagcctttccctcggtaccgaggacgatgtgcaggctgccgttcagaatatggtggtgtataacgtcacctatgaaaagtccgccgcgggcattgcagtctattttccgtgcctgtggccggattattacggcgatacacgctttgaaatgacctgcgtcggcttcccggaatcgtattttgaattctacgataaattcatgaacacgatgctctccgggcagtcgctttcgcagagtgatatcgatttttactcctactacgattggttcgattcctccgaggttggcggcgaaaacgtcaccacaataaacgacaacgattttgaactcatcgacaagggcgactattatgcactctctctttccgatgaagcatggaacctcatcacgtacattgatatgaccgtttacctcgacgacggcgagggatacattgaccttggcaatgacaacgtgtacgagtttgacgacgacggcgacctgaaagtcgattttgactatacatggatctcgatcgacggcgtgattgtgccgttctacgccgaaaccgaggaacagacggacgattattggtacacaacgggttatgtgccggccgaactgaacggcagcaccgatattgagatcgttctgcgctgggacagcgaccatgacagcggctttgttgcgggctaccgcttaaagaccgaagagcctacggtagcggcaaagggtctgcacagctttacggagacggatcagattcagtacacctgttcgtattatgattacgatttcaactacgaccgggactacacgctcggcgacccgataacatacacaagtgaacccgtcgtcacctatgaggaaatcggcgaataccgcacggtgatccaatacaccctgcgcgacatctacaacaacgaacactttacagacccggtagagctttcctgtgaataaatagctctatagaacataccctgctgcgctccgtggcagggtatgtttcgatttgacttacactataataggcggtataataaaaattactgacaaaaacggaattgtatggaaaactatgccgtttaaactgttcggaaaggacgaacgccatgcgaaagctcctcgtttacatgaaagactacaagaaagagtcgtttttagcgcctcttttcaagctgctcgaagccacctttgagctgattgtcccgctcgtaatcgcgcaaatcattgacgtgggcattcagaccggtgacaccggcttcatcatctcccgctgtctgcttctggtcgggttcggtgtggtcggcatgatcagtgccatcacggcgcagtattttgccgcaaaggctgccgtgggctttgccgccgggctgcgtcacagcttgttccaaaaaatcaacgagctctccttctctcttttggaccgtgtgggcacttccacgctgctgacacgcatcacaaatgacgtaaatcaggtgcagaacggtgtgaaccttgtactgcgcctgtttatgcgctcgccgttcattgtgttcggcgcatgcgttatggcgttcaccattgatcccggcagcgcgctgctgttcctcattgtggtcgctctgctctccgttgtggtattcggcatcatgctgctgaccatcaagcgctacaaggctattcaaaaccagctggattccgttttgaacaccacgcgtgaaaatctgaacggcgcacgtgtcatacgcgcgttctgcggtgaagacaccgaaacagaaaaatttatcggccaaaattcgctgctctccaagctccagaaatccacgggccgtatctccgcacttttgaacccggttacgtttatcctgattaacgtcggcatcattctgctcatccattacggcgctgttcaggtcaacaccggcattttgacgcagggtcaggtcgtggcgctgtataactacatgagccagattttagttgagctcatcaaacttgcaaacctcatcatcaccgtaacaaagtcctttgcaagcgccgcacgtatccgcgacgtgctcgagctcgacacaaacaccgtttattccgacgacaagagaatctacaatacccacgccgtcgagttcgaccgcgtttccatgcactataataaaggcgcgaagaacgcgctcgaaaatatcagcttcaccgccgagccgggcgagatcatcggcgttatcggcggcacaggcagcggaaaaacgacgcttgtggggcttattccccgcttctatgatgcgtcctccggcaccatccgcgtggacggccgcaacgtgaattcctattcgcttgaagaactgcgcgaaaaggtgcacgtcgtattgcagcgcgcggtcttgtttcgcggcacgctgcgcgaaaacctgctttggggcaataaaaatgccaacgacgaagagatgcaggcagccgtaaaggctgcgcaggccgcagacttcgtacagagtaagggcgggctcgatatgaagattaccgccgaaggccgcaacctttcgggcggacagcgtcagcgcctttccattgcccgcgcacttgtgggtaatcccgagattctcattctggacgactccgcttccgcgctcgactatgtgacagaaaaggcactgcgcagcgcgctttccgcactgccgaataagccgacggtgttcatcgtctcgcagcgcacatcttcgctgcggcacgcggataagattctcgtcttagacaacggcgcgcttgtcggctgcggcacacacgatgcgctccttgagaactgctccgtgtaccgcgagatctatgactctcagtttggcggaaaggaggcagctgcgaaatgagcaagataaataacaaaaacagtaccattaaacgtgttcttttgcaaatccgtccgtatctgccgaccatcattttgctgcttgcacttgccgtagtcagcgtgctgtgctcgctatacatcccggtgctcgtcggcgacgccatcgacgccatcatcggcaaggaacaggtcaactttgccgttatcctgccgaagctcttcacctgcgcggtgctcatcggctgcgcggcgctcgcccagtggctgatgaatgtctgcggcaacaaggtcacgtacaacaccatccgcgatatgcgcgaggcagcctttaaaaaaattcaccgtctgccgttttcttacctcgacgcacacgaaaccggcgacatcgtttcacgcatcattgccgatgttgaccagtttgcagacggccttttgatgggcttctcacagctgtttaccggcgttgtgacgatcatcggcaccatcggcttcatgctttccgtcaacgtttggacaacgcttgttgtggtgcttgtcacgccgctttccattttggtggcgcgcttcatcgcaaagaaaacgttcgccatgttccgcttacagtccgaaacacgcggccgccagacggcattcatcaatgagatgatcacgaaccagaaggtcgtgcgcgcatacggtcatgaagacgaaaacatggagaaattcgacaccatcaacgaagagctgcgccgccacacattaaaggcgacattcttctcctccatcacaaaccccgccacgcgctttgtaaactccgttgtgtacgcggcggtcgcgctcatcggcgcttttctggccgtgaccggacagggcttcaccattggtatgctctcctgctttttgagctacgcaaatcagtacacgaagccgtttaacgagatttccggcgttatcaccgagcttcagaacgcgctcgcctgcgcagaccgcttgcttgaattcctcgacagcgaagaaatgtctgccgaccccgaactgctgccggagcacagcgagaccgcaaagggacaggtcacgttcgataacgtttgcttctcctatacaaaagaccgcccgctcattcgcaatttcagcttggatgtaccggcaggctgccgcgtcgccattgtaggcccgacgggctgcggcaaaacgacgatgatcaatcttctcatgcgcttctacgacccggatagcggcagcatcagcgtggacggcacgaatacgcagactatcccgcgccgcgcactgcgccgtaacttcggcatggtcctgcaggaaacatggctgaaaaccggcactgtgctcgataacatccgcatgggccgcccggacgcttccgaagaagacgttatcgccgccgcaaaggccgcgcacgcacatagttttattgagcagctgccgaacggctactatacgcagattggcgaagacggcggcagcctttccgccggacagaaacagcttttgtgcatctcgcgcatcatgctgacgctgcctcctatgctgattctggacgaagcgacgtcttccatcgatacacgtaccgagctgcgcattcagcgcgcatttgccaagctgatgcgcggacgcacctcgttcgtcgtcgcacaccgcttatcgaccatcaaggaatctgatgttatccttgtcatgcgcgacggcaacatcgtagagcagggcgaccatgaatctctgcttgcgaaaaacggtttctacgccgagctgtaccgcagccagtttacggatgaggaacagccagtgggttaacgcacaaaaatgcagccttctctattcgagagagctgcatttttcattttctgccataccgcacaaagctgcgttttgcactttgtgcggtattttttgaatatcaatatagtggaagttttagtcaatgcgtttgaggaaatcaaacggcaaaacgattatgatagagatataggcgaaccttgtccggactgcgcatgcgcaaactgcgtgcggaacgccttcggtgcacagccgtagcgctccgtaaataagcggtaaaaccggcttaagctgttaaagccgcatgcaccgcagatttcaatgacgggcatgtccccctgcaaaagcagctgcgccgccaaagacaatcgcttgccgttgatgtactccgtcggcgtcatgccgatgtagcggcgaaacgaccgcgtaaggtgctcctgcgacatatttgcaagcgctaaaagacacggaagacctgtggtgtaattttcgcgccgctccattttttcaagcagctccgaaaaccacgcaggcacagccgctcaaacaccgtgcgcggaataccgatatcgagcagctcgaaatccgcgttgttgaaaaaatcatagcggtgcacgtccctcgggcgcatcaaaacgaacgagccttcggaaagcagctgcgagcgtccatttacggcgtggatggccccgccgtgcgagacgagaaacagctcgtaaaaatcatgcgtgtgaattttatacgtcgccggcacaccgcactggtgcagaacgcgcgcaccctcaccggtgtgcagattttcttcggaaaaatgcagaagctcaacgtcgctcatttcggcgccccctttcttctgctattataacgcgtcaaaaaaacggaatcaagaaatttcaattctaactttgggaggataacggtatgttcaagaccgatgttcaaaaactgcgcaacgcgttggaattcacgcgcatttacaaagagaacacaaacgacatttacctgcgtgaagccgcctgcatggattttcagctccgtcatatcttagtgccaatggatgaaaacgacggcatcgcgggccgctatgagcacgactttgtgggcttttcctcgcaggtcggcggcatttacacgtattactttaacgagcatgaatttttgaacgcatacatggcttgtaagcaaaacggtgagatcaccgctgcggaggactacgctttgcaggctgtgcaggcctattggcacgaggaaaacaccgcgcgcaaggttgaattggaattttcgaaacgctacggctatgtgccgccgaaagcttttcccggtgcgggcgtgggcaactgcgactgccgcgtagcaggtacaaacctcgattttgaaaagctcatccatctcggctttgacgggctcgatcaggagatcgaccgcgcggcggaagtgaacggcgcgtcttcgttctacacggctttaaagctgtggattgaaagcctgcgcggcgcatgcgagcgttaccgcgaacaggcattggagcttgccgaaaaagcagagaccgaagaagccaaaacgcgctttacaaatcttgccgaagcacttttaaacattcagcacagcacaccgaagacgttccttgagggcgtgcagctgatgtggatctacgctgtcagcagcgacattatgaattacagccgcatggacgattaccttgggccgctctatgccgcggatatcgacgcggggcgcatcacggaagaagaagccgtgcagaccgtgctgtatctctataagcactttaaagagattaacaagatccatgactgccgcgtaatcatcggcggcgtgggcagaaagcaccagaaggaagccgaccgcctcgccatcgtcatcatggaagcttcccgccgcttccgcgagactgtgccgcagctcaccctgcgctattacagcgacatggacgagaccgttttccgcaaggcgatggaagtgaatgcggagggcaccacgttcccgattatttactccgatgagacgaatgtaccggctgtggaaaaggtctttggcgtttcgcatgaggaagccgagcaatatgtgccgttcggctgcggcgaatacgtcatggtcggttacagcgtaggcacaccgaacaacggcatcaacgcgctgaaagcgctggaaattgcgctgcacaacggccttgatttctaccagaacgttccctgcggcgaaaaaaccggcgacccggcgcagtttgatacctttgaaaagctgtatgacgccgtgcttgcacagctcaagccgaccattgaccgctttgctgtacacaaatacctcaactataaaattgcgggcgaaaacgcgccgtatctgcacctcagcctgcttttgaacgactgcatcgcgcgcggcaaggcgacgtttgaaggcggcgtgcgttacctaaatgcttccagcgaaatgttcggcatcatcagctgtgcagacagcctgacggccattaaaacgctcgtttatgacgagaagaagttcactttgccggagctcatcgatgtgctggatcacgattttgaggggcacgacgatattcgccgcatgtgcctttccgcaccgaaatacggcaacgacgacgacacggctgacgacatcgcgacgcgccttttcaccgatattgccgaccttaccatggcggcaggtaaagctgcggggcttgaccactacaatattgtcagcgtcaacaattccatgagcgcagaatggggcaacttctgtgcggcgtctgcctgcggcagaaaggccggcagccccatggcaaacgccaacggcgcttccatcgacgcggataagtgcggcattacggcgctgctcaactccatgtcgaagtttgacaatacaaagcacgtgggtgttatcaacaatgtgcgctttacaaaggagctcttcaagggctctatggataaagtagaagccgtcttgaaggcgttttacgacaacgacggcgtgcagacgaacctgtgcgtcatcggcaaggatgaccttgaaaacgccatggtgcacccggaaaactaccagaacctcctcgtgcgtatcggcggcttctccgcgagattcgtcacactgaatcctgttgtgcagcgcgagattattgagcgtacgacctacggcgcgtaagcggaggccgatatgcgggatcttatttttgatattcaacgtttttgcgtgtatgacgggccgggcattcgcaccaccgtgtttttcaaagggtgcaacatgcactgtgcgtggtgccacaatccggaaagcttttcaaccgatgccgagctcttgtttcgccacgaaaaatgcacgtcctgcggggcatgcactgcggtatgtccgaacggagcgcatgaaataaaagcagacggcacacatgtttttgaccgtgcaaaatgcgcggcgtgcggcaaatgtgccgaagtatgtccgaacgatgtcctggagttttccgggcgcgaaatgacggtggaagccgtgatgaagcagatcgacaaggacgcaaaatattaccgctcgtcaaaaggcggcgtcaccttttcgggcggcgaggcttctttgcactttgaactcctgaaaaagctgcttacagcctgccgcgaaaaaaggtaccacaccgcgctggagacaaacggtttgatctctgccgcacatttaaaagaactgataccgctcaccgatctttttctgttcgattttaagcacagcgaccccgatgccctcaaaaaatgggcaggcgcgccgcttgcgccgatcctcgagtccctggcagcccttgaggacgcgcatgcgcatgtgtggttgcgctgcccggtcattccgggcgtgaacgacacggacgcgcactttgaggcgatttgtgcgctcaagaatcaatatacctgtattgaaaaggccgagatcatggcataccatgacatcggcaaaacgaaatgggacgcgctggggataccgtattcgctcgccgcgctgaaaaccgtttcgccggaacagaaacatatttgggagactaaaatagccgattagcggcacttttggggataagagagggaacgcttcgttccctctctttgctttatctcccacattttttctaaacatttgacagatttcccggaatattgtatgctatggaaaacaccgcagattttccctgcgggaccacaaacattaggaggtcacttatgttttgtatatactgcggcgccaccttgccggagggcgcaaaaaaatgcacgctctgcggcaaccccgttgtgcgcacgccggaagccactgcacaacccgtaagcgaaccggagtcggaatctgcccccgcaccggaaacgcccacggagcctgccgtggaagacatctcctcaaattcgacagagagcctctccgaagcggaaccgacacctgaagctgaagatatcccttcaaacagtccggacggcgaagatatttacagctattccccgacggacttcacggaggatatctcctccggcgatgcgctcggcgacaaacccgaaggcatggagcacgagggcacattcaccgtttcccccaccccggaggaaatttcaggaccggagccgcgcgtgcaacccatagaatatacgtataacgacggctacgcctacgaggaatacgacgaaaaaccgaagaaaaagcgttcttttaaatggcttttcatcgtgcttcccattctcatcgccatcggcgctacaatcggcggcattttctggtggtacaatgcacccatgcaaaagctcacccgcgcgcttgacgcttacgattattccgctgcggcgcaggtacttcccacgctttcaaaggacgaactcgcttcggtctccgaccaaatgcaggaatatgcccagacggtcatcgaccgatacaataaaagcgaagcgaactacgacagctcctatgaactgctcgaccgcctgcaaaagctgttcccgaacatcggtctcgacgatcagctcgacggcattcaatcgctgaaagactccaaagaggcctacaaaaacggcaaaagcctgcaggcacagggcgaagacggccgcgccattacggaatatcagaaggtcattcacgccgatgtgaaccacgacgacgcgcagacgcaaattcaaaacatccgcaccgcatacaaagaaaaagtgttaagcgatgcgcagagccgcgcggacgagaaagatttcctcggtgccgaagccattttgatgaacagcgccgatatcctcggcgatgataaagacatccaggctaagctggaagagattaaggacgcagagctcaacaactacgtggaaacgctgctcagcaccgccaaaacgctcgcggatgacggcgacttgcccggcgctgttaacgtgctgcaggacgccacacgcagtgacaagcgcatcgacgcgcagattgccacctacaaaaaccagtataagcaaaaaattctcgatgctgccgcaaagcaggccggtgaaagccgctattatgacgcggtggaaacgctgcaaaacgccgacgacatcctctccggcgacagcgacattgcggcaaaaatcgaagaatacagggagctttaccccgtttcgctgacagatctttccccaagcggcggcgaagattgcagccagaactggacagcctatgacgtaaacggcaatgcgtacagcaacggccttaatttctcgctgtaccctgtcatcgcaaaaaccgtctacaccgaatacgccccgaacggacaatataagcgcctgacgggcacatgggtcgtagagggcgatacctccgacgattttatcggcacggttcgcatttatgtggacgaccatttgcagtatgaagtttcctcgctcacggtgaacagccccgcaagcgcgctgagcctgagtatttccggcgcttccaccgttcgcattgaagtggagggcgcgttcgcctcgctgcgtgccgtcggttatctgtaccttgcagatgcgaaatttgaaaactaaaccgctataaaaagagataccgcacagggtaaactccccttgtgcggtattcttttgcgcaaagcctgccgtgcggtctatgcacgtgcagctgatccttccacaatacagaaaaactctgtggaaaacacaacgcgcataagaaacgggatgtccctttttgggggacatcccgtcttactttggcttacgccttatgcttttgttccatcacgcgtttgctgcgttctcgtcttcgtcgttttcgtccttcttctttttgcagaggaccataacaacgacctgtaccagcgcgattacaacatggaggattgtccacttgtcgacgaagatcatcggcagggtcatgtcttcggtgaagatgaagacgatgatggcaatcagagccgggatgatgctgatgagtctccaaaggcccttcttgttcttttcgtactccataacctctttgccgttctcatcgagaaccacgttgccgtcttcgtcttccaacgccttctttttcttaccgatatagccgatgagaaggaggatggaaaggagggtcgtcacgatggtgaggatcaggttgatgagtgcccaagcgcccgtgccgagacctgcgagcggcgttgcgttatctgcgatatcttcaccgtttgtaagcggtgtttcgttatcgttgatcgtttcgcctatttcgccgtcattattgccatcgccttttccgccgttatcgctcggcgttgtggaaggtgtggcagtcggtttcggggtgggtgttgcaaccgtagccggaacgaccggagctaccggcgtcggagtagatgttgccgggttcgggttcggatttggagccggtgtaggtgtagactcttctgtcggagccggtgtaggtgtagattcttctgtcggagccggtgtaggtgtaggttcttctgtcggagccggtgtaggtgtaggctcttctgtcggagccggtgtaggtgtaggctcttctgtcggagccggagtgggtgtaggctcttctgtcggagccggagtaggtgtaggctcttctgtcggagccggagtgggtgtaggctcttccgacggaatcggggtcggcgtgggatttgcttcccaaacagccttcagcacaacgtccttagccggcatcgtgaacgcatcgttctcgatcgtaacctcttcgcttctccaacccgagaacttatagccctctctggtcggaaccgtctttacaacttctactgttgctttgtacttgtacgggaactcgttggtcgcttcagtccactcgccgccgtcgaggtcatacgttactttgtagatgtttgcttcccactttgccttcaaagttacatcctttgcaggcattgtgaacttgctgctgaccgtgatttctttgctagtccagcctgcgaacttatagccctcacgaaccgggtcagactttacggtgattttatcgcctgcgtactgttcatactcgagctctttatctgtttcagacgctgcccaagagccttttgcaaggtcgtacttcaattcgtacttctctgcttctttgtatgctgcgtagaacgttacatcggatgttaccgtatacgggaattctactgcactacctgtaagctctgcatttgtataccaaccgtcaaattcatatttgactttaccaacatacttcgtctcatatgtattgttcggctgcgtggtcttattgccggtaactgcatttacctttgcagtctgcacggtctgccaatcatccttacctgcatctttaagttcgtacttgacttcgtactggatttcttcccacttcgccgtcaaggttacattctttgcgggcattgtgaacttgctgctgaccgtgatttctttgctagtccaacctgcgaacttatagccctcacgaaccgggtcagactttacggtgattttatcgcctgcgtactgttcatactcgagctctttatctgtttcagacgctgcccaagagccttttgcaaggtcgtacttcaattcgtacttctctgcttctttgtatgctgcgtagaacgttacatcggatgttaccgtatacgggaattctactgcactacctgtaagctctgcatttgtataccaaccgtcaaattcatatttgactttaccaacatacttcgtctcatatgtattgttcggctgcgtggtcttattgccggtaactgcatttacctttgcagtctgcacggtctgccaatcatccttacctgcatctttaagttcgtacttgacttcgtactggatttcttcccacttcgccgtcaaggttacattctttgcgggcattgtgaacttgctgctgaccgtgatttctttgctagtccaacccgcgaacttatagccctctctggtcggaaccgtctttacaacttctactgttgctttgtactcgtacgggaactcgttggtcgtttcagtccactcgccgccgtcgaggtcgtacgttactttgtagatgtttgcttcccactttgccttcaaagttacatcctttgcaggcatcgtgaacgcatcgttctcgatcgtaacctcttcgcttctccaacccgcgaacttatagccctctctggtcggaaccgtctttacaacttctactgttgctttgtactcgtacgggaactcgttggtcgcttcagtccactcgccgccgtcgaggtcatacgttaccgtgtacgtcttcacctgccaaaccgcatagagatggttatcgccgttagcgtcgacaaaaaccgggtcattcggctgatattcaacattaccatacagcgtggttgcccagccgcggaattcgtagcctatgggggctttgaagccgacatcgccaagcgattttacgattgcgttcgtattcttcgggtgattatcatcctcaaagatatcgtccttgtagctgccatctttatctgtgaaattataatgatacgtaatcgtctcggtttggggcttattggtgtagactgccgtcaacgtggtgttctttgtgacggtaatcttatcgcccgggtggatgagcttgccgtcttccgtttcccaagcgcggaagttttcggaattttccggcggaagtacgcgggcggagctgccgcttacatacttctggttatccgttgctacgttttcgttcttgtcctcaacgtatgtgaccgtgaagccatcctttgcggaggggaagaacggggaaatcgtaacggagctgtaaagctcggtatctacattgaataacgcgccgttgttggaatcaatccaagcggagggctgttccgtgaaatttttaagcagtgccttaaaatcttcggaatccgaaagctttttgccgtacggaatttcaatcgttttaaactctccgtccgcagaggccgtcaggtaaaccgtagcttcaataaccggcgcctgccactttgcgaagagcgtaatgttctgtgcgggcattgtcttgccggtgaagtcatacgccgtgccttcgcaaagctcgttatcataccagcctgcaaacgtgaagtttgcgggtacaccggccggtttttcaggtgtgtagttgacatcggaaatatcctgctgatacttgcggctgattatattatccttcgcaccgttattcttgaaaacgatattataggaattgcgggtatagtagaatcttgcgttgttgtaactacgtccattttgcgtaccactactgtacgtaaagccagtaattggatacttatcttcttttgatactgtataacctgtaccaggacttgtatcgtggtgatcttctttataggttactccaccgacagtagttgttcccttttcgcccggcagaacttctacataatagtatgcagtctcactgcctctaccggttttagggccatagaaagtcgcaccattcaatggcatggtattaatattgacctgataggtactaccgccatcacttgtgctccatgtgttgctgccattgtaagtaggccacttcttactgatgttcgcgccatattttgccgtaattctaagacttgtatactcacgagaagaagagaacaagccactgtagctgtagaacttaacgtcataaacatttctcttataataaacgtttacgattgtggagccgtcaccggcaatggtcttctgctcaatcgtctgtgcggtaaaaccggaataagattttgctttagcattcgttctgctgtttgtggcgccggtctttttttcaatatcctttgaggaatactcgttatcatccgcattttcaagccaatggataacggtgtatttcgtttcggaattggctttccagtgtgcggtgacggtagctgttccggaaaccgttgtaaccgggttgccgtctgcgtcataccaaccgtcaaacgtgtagccgttgcgggtgggggtgactgtgctcaggtcaagcgtttccatccggaactgcggcgccacatagtcgccgccgtcggtattaaacgtgacccagaaaccggttttaactaccgggtaaacgtatgtaacgccggctgcaaatgtgatggtttcgggggtgtcgctgccctgcgtggtgctccagccgacaacgcctttttctttgcccatggtgagctcaaccttagcggtcgcggcgttcagaacgtcttcgccgaccgtttcaccggctgtgcccgcggcggtgtggtaaaccacggtatcgccgtcttcatccaagaagtacacgtagctgtactcctcaaacctcgccgtaacggtcacttccgtaccgctgacagccgcgactgcgccgaagcttaacggggtctcaccgacataccacccaacaaagcgtgcgttttcctttgtcggtgcagtcggctcgaggagctcatcgcctttggcgacggtctgctgccactcggtcagctccgtgtcatctgcatcatagaaacggtaggtatcgaccgtgggcttctcgtcgtccggacgcagcatagccgctacaatgcccgtttcctcgctctgtttcgcaggtgcagtttcttctgcacctgcggcgggggtcgcctgtgcttccacttcaacgggagccggggtctctaccggggcgggagtgggtgtctcctccggggttgcggtctcctcgggcgcaggcgtctcgtcaacgaccggcgctcccccctgcataacatcccctgttgcagtgtaggtgtttgtttcctcatcactcattgcaaacgcgcccgtaggacatgccgaaaccagcatacatgcgctcagcaacacggcgatgatcttctttttcatagtgttttcctccaatcctgtgatttgtccgttttataacaaatatggattcctaaattgatgtgtgttactgtgccaaaaccgtttccatttggatgagcagctccagcacactgcggaacgcggcctctttgccgccttttgtccaccgcagtctcccctgccagctgtaattctggcggaacaggatgtccagttcaaacgtgggtgtttccgtacattttatgggagaagctttcggcgcgccgcctgtatccagctgctcttccaaaagcaggatcaggcgtgaaagacttcggaatagggtttcctccgggagcgtcccgccggagaccctgccgcggatgacaccgtcctccgcttcatccacaaagatacggaaggtctctgtgccgatcggtagcatacgattttctttcacctaacccctcccttttgtattttgtgattctattttacacaaaggtgctatgagaacgctatgattaagaagttttttcatagaaaaacgacccattttctcataaaaaaagaaaataggtcgtagtttttttgtcaactatgttgagtcaaccggtttattttttcaggtgacggttttaggcctttcggcgctccgttttctccgttgctttttcttctgcgcgcatatgtatgtgacgcaggtcgagcgatttaaaggtgtaggtcgcaccgcttttcgggtattccttttggaaccgattgaacacacggcgggaaacgagcccgccgttttcgccggtcgcacccggcagcagcacccaaaactggtttgcgcccacctttgtgaacgggtcgcccgcgcgcagttcgtttaaaagcgtcacttccatctgcttcatatatacggcgcgcttttccgggtctatcgagcggtttgcaagccgcacaatcatcaacgccgcaggggtatcgtttcggcgcatctcgcgcacatgcagatttacaatctcgcggaaaacgttgttatcgcagcaaaacgcaccggtttcctgttctttttcaagcaggaacgtttgaatatcgtcttcactcgtctcgctgccgtaaatctcctgcaccgcaagcgccttctgcgcctccagctccgccgaaggcgaaacaccgtagacctcccggtacagcgaagcgatgtaatcatagtgttccagcgcttttttcgggtttttgttttttatgagcgcctgcatcaaaaacacgctgaattcctctgcggcgggatctaaacggataacgcccgtgcatagcttttccgcatccgtaatgcgtccgagcttcaaaaggcgatccaccgccgcgcgacataggcgcgtataaagcgagcggtaatacgtgttgaggttgatgcaccagaactccgctgcgctttccgtgagaaaatcgccggtgtaaagcgccacggctttctgcgccagggcaaccgatttttccatatcttcttcggcaagcgctgcctttgcaagtgtttcaaattgctccacgtcaagctgtgtctcgcggtccggcgcccagcgataatagcccttttcgttatggattataacctttgcgtgcgtaaagccgagctctgccagcgcagcccttgcgcggctgacattattttgcagcgtgcttaacgggttatcgttttcggcttccggccacagcaggtcgatgagctcctgcgcggaaacgccgcggtttctgttcagaataaggtatgccgtaagcgtccacagtcttctggaacgtcccgtgaggctcacagcgtgcggaacctccataccttcctgctttaatgtaaacttgccgaacatggtcacatcgatcttcggcacaacctgtatcgtttcaccgttctgtgcttcacacggcagcccggtggtttcaatttctttcgctgttcgactcatgaacggttcatctccctctttcagaaataacggttcaaaatatcaccccggctattgcgaaaaaaataatattccgaacttgttcttttcataaagtatagcacacttcacggtatttgtaatccaccgaaaggtggaaaatgcgatttttctcataagtatttacttttttgtcggagaaaataccttttttggcgaaaggtcgcgctaaaaactatgacttaaagtaattgcagacgtttttgcatcgtctcatagttcgtgcagtagtaaagcgccgtctcctctgtgatgcgcttttgccgtacaaggtccgcaagcgccatgtccatggtgcgcatgccctgcgccgcgccggaagcgatggcggcatcgagctgatgcgttttgctttcgcggatcatattgcgtatcgcgagtgtggaatacatgatttcaaacaccgggatgggtgtgccgtctacgccgggcacgagctgctgactgatgaccgcctgcaaaaccatggaaagctgtaagcggatctgcgcctgctggttcggcggaaatgcgtcgatgatgcggtcaatcgtattcgccgcgccggtggtgtgcaggctcgaaagcaatagctgccccgtttcggcggcggtcatcgcgacctccattgtttctttgtcgcgcatttcgccgagcaaaatcacgtccgggctttcgcgcagcgcactgcgcaaagcggcgacgtagctcgggcagtcgcagccgatctcacgttggctcacaatgcacttatcgtggcgatggatgtactctaccggatcctcgagcgtcagaatatgtcccgtgcgcgtgcggttgatctcgttgatgatacacgcgagcgttgtggacttaccgctgcccgctgatcccgtaacgagcacgatgccttttttcatctgtgccgcgcgcatgacctccggcggaatgtgcgcttcttcggccgtaggcagaccgaagcggatgacgcgcaccacggcggcaatgctgccgcgctggcggaacagattcacacggaagcgtcccgtaccgctgagcgagaacgaaaaatcgtcatcggtcgcaccgccgtttaagcagtgcggctcacgtgcggcaagacgatagatttccgctgcgaatgcttcggtcttttcgggcgtgaaggcgccgtccgccgtttcacgctgctgttcgccgcgcaccttatacgtcagcggcaggcccgccaccacgaaaatatcggaagcgccgcgctccacggcacttttcaaaatttcagtcatattcattgtactccgcctttcttacccgaggttcagggagtcatccggctgccagcgcgctgtgcagcgccattttgcaatctcatagctgccgttcatcttatttaagcagatctcaagctgcatgttgccgcgcgtgatttccgttttgagcgtggtttcggtctcttcggtgttttccggcagatctaccgcgccctttaaatacgcatctgcttcggaaagccagtcttgcccggcgttttcgcaggcatacagcacttccacgtgctcgccgtaacgctctgcggcacggcgatcggatacggcagaggacaccgtaagtacgccgaaaatggcgacgcacagcacaacgaccgcgaacaacaccgcgatgctgccgatgcggaatcgatttcggctcatggcgttccctccttcggctggtagcaccgtacctccagcgcataaatttctttatcctgctccgccgtgtacgccgtgattttcccggcatacaatgctcccgtttcggtctcggcgccggtcacttcggtttctatataatagtaagcgtccgcttccgcacagcttgccatatcttttgtgaaatatgctatttcgccgttttcggggatctctcccgcgcgaaactcctctgcggcgctgcggcacagcgcaatgcctgcgctttccctcgccgcttcatcgctgatgacggccgcgcgcaggaacacgcacgcaatgacaccgcagcacgcgacaaatgccagaacaaatacaagcagcggggtcataaagcccatgcggtggcgcgtttcactgcgcttttcctcgtaatctatcatgccgcgccacctccgtcacaatacgcgccggcggtcatgccatccgcagtgatcgttaaaagcccgctttccgaaagctcggctttaaacgttttaaggtcacacagcttttcggcgttattggggtcgatctctgccgtgacccgtgaaaactccgtgcgcagcgcgttttcatataaatagatgcgcgtttcgaagtcgctttccggctcgcgcaggcacaccgccgggccctccgggccgtcgatcaggcggatgttccctttgccgccgcacgctgccgtttggctttgaatatacgaaagcgcgctgcgctgctttgcgtgtgcgtcgcaggcatccatcgtatcggaatacagccgcgcgcccgcaagcgtcaacaccaaaagcgatgcgatgagcaatgcatacagaagaagcagcatcagagaagtgctatttctctttttcggttccgtcatgcgccctccttattcctcgccgcgcaccagcacctgaacggtcggcagctggttatcggcgaaaacctcgtatgtcacgatgtattctttcttattgaccgtaagcccgtagtgcttttccaaatattcaaggctttccgggtatgcgccctctaaggtgtagcactccacggcgctgcgcaaaacggcttcacgcacggcggcacggcctgtttcgcggatatcctcctgaaaaaccggcacgcacaccgcggtaaaaattaccgcaagcaccagaataagcccgaccgcgaaaagccggaagcttacttttcgattcaaaatacccataacttttccctcagattgcgctcaaaatgccgagcaagggcagcatgacgcttaaaagcgtcaaaccgacagacgcggtgagaaatccgatcaaaatcggctccgtgcggtcgatgacgctacacagtccgttttccgcctcctgcgccgtgcggcgcgcgaggttttccgtcacctgcacgagctcgccgctccgcgcaccgccaagcagcattttgccgtacatggcgggcaatatcttttggtgcgcaaacgccgtcgcaatgccgacgcccatctgtgtttcttcacggcatttttcaagcgcttcgtgcagctttttgtggcgcgtctgctcgatgcacagcgcaagcgcactgtcttcatccgtaccgctcgcaagcaaggcggagagcgtgtccatcacctcggagaccgccaaaagccacgcggctttgcgcgtgaagcggctcgtttccattgtatttctgagcttttcccgacctttatcggagcgtataccaaacgccaaaacgagcaaaacgatgccaaaaagccccgcaaacaccaagctgatgcgcccgatgagcgtcgccgcgagcacataggcataggaagatgaaagcaggctgcccgttaaattgtcgtacacgcgctcaaacatgggcagcacggcgaaaacgagcaccgccagcacgccgcacatcatcagcatcaaaacggccgggtatgtaagggtactgcgcaaacggtcgtatagcgcgctttggcggtcatagtggtctgcaaggcggtcaagcgcttcgtccaatcggccggaaagctctgccgtgctaaaaacgctcaaggcgtattccgggaaaacgccggtcttttccgccgctgccgaaaacgtctcgcccgccgcaaccgaaaggctgatctcggtagaagcctgccgcaaggcggtatccatgccgtcttcctcaaacagggaagaagcctccgaaagcgacgcgccggagcgcagcagcattgcaagactgctgcaaaatacgctgagctgttcctgagtcaaaaatttttctgccatgttcctcgtcctttcgcttttctaataagtgaaccgcgttgtgtattccgaatcgttttgaatctccccggcaggcatgccgcctgcggcaaaggtgatgtccacccgctgccactcatccgcttttgcgcggatctccacggtgatccacccctcgctctccacataaaagctgttccacgcgtggtaggtctcctcacccacataacccgtgatgagcttgcacggaatgccctcgctgcgcagcatggcggcggcaaggcttgcataatcaaagcatatgcccttgccggtctttaaggtctcatccggggagggcaggtagccgttctgcacggtcgccgctttttccgtatcgtattggatattcttcaccatgtagtcatacacggcggcagcaatgtccgcatcggtggtgcagcttgcggccagctcgttcacctttttggtgcaatcggagcttttgttgtaattcaccatctggttcgggcgcaggtatggctgaaattcatcttttagcgtcacgtcgcggtcttcgctcccgatgcatgcgtatttgctgtcgcccacctgctccatcaggcggaacgtgtatgcgccgtttcccatgttgagcgggaaaaatgtcgcagtgccgtcgttcggcaagtcatagttatatttatcctcgccgcagacaatctgcatttttaatcgcgtatcgctctgcgcttttacgccgatgatgccgccttcaagttgggaaaggtcaatctctccgctgccgaacgcggtcgcttcatcttcgttgaagacggaatcccgaaaagcggggacctcgtagggcgcggcgttgctgtccgtgacatcgcccgccgccggcttggcgtcgtttgatgccgtgccccgcgccgcacagccgcaaagcagcaaaataagcgccagcgccgccgctaacagctgaattttttctttcatgccgcaccccctgtcttttctgtgtatactaaatattattttatcttgtttttgtcttatacgcaagccctgtgcaaaattcttctgcatggctttttccgtcgattttttcaaaaaaatgcgcttcaaaccattgacattatatatataatgttgtaggtataaatttcaccgttttctgaaaaattcccgcatgtttcgcggtgtttctcaaaaagcagaaagagtaatttaaatgaagaaattcatgtctttcctgctttttgcacggctcgttctctctcttgcagcgtgcgaaagtaacggcggtgccagaaacaaagattccgaaatcagtgtgagcagcacggcttcctccgaagcagagtcctctgcgacctcacaacgtggaacgagatcacgaaatccgataccgttacgcttgagttttaagctttaacctgtatccgagcgccttgcggctgtttacgcagccgggcgttctttttgtttttccgaaattttggcgcaggagttttccacgaacacattgacaaaccgcgcaaaaaaacgtatgcttatatatagagttatatctaacttagaaaggagcgcttgcagatgacgtacaccattaaggaagcctcggacatcacgggcattccggcgaccacgctgcgctattacgataaagaaggcatcctgccgtttttggagcgaaaggaatccggccacagaatgttttccgaacaggatctttccatgcttcgcattatcgaatgtttaaaatgcacgggcatgtccattaaagatattcgccagtacgcggtgtgggcacaaatgggtgactccaccctggagcagcgctacaacctgtttcttgagcgccgcgaggccgttatggcacaaatcaaggagcttgaagatcagcttaaagtaatcgattataagtgcaaatactacgaggaagccattgccgccggtacggaagacattcacaagcacaaaacaggccactgttgcgacgatgaaaaagaaaacaaaaacgcgtaagttccgcaaaaaccaaaggcacggagttttaaagctccgtgcccttttgttgtataagtcataaccacacctaaaaggagtggttatgacttttgcttaatttccttattttagccctgcacagaccacgtgataccctgcggggtatccttcacaacgatatggcgtgcggcaagcgcatcgcgaatcgcgtcggcagttgcccagtcctttgcctttctggcttccgtgcgctttgcgatgagcgcttcaatctccgcggcttcctcggcggtcatgccctccggcacagcggacttctgcgcattctgctcctcgcgcagcgcctttgcagctttcagcaagccgagggacaatacttcgtcaaactccttgatgagcgcaagtttgtccgcgtcggaaagctgagctttcagtacgtcgtacagcgctgtgagtgccaaggacgtgttgaggtcgttttccagcgccgcgcggaacgaggcacgcagcggctccatggcagcttcgtcgtgctctccctcatttttcagcgctgcaatgcgggaaacgagctttttgtacgccgtggcggtgttgtcaaggctctcaaacgagaacgtcagcggctttctgtaatgggactgtaagcagaacatgcggtatacaagcggcgcgtagcccttttcctcaagcagcgagaccgtgagaaaatcgccctttgatttgctcatcttgccgcgcgcgtccaaaaggtgcagcacgtggaaccagtatttgcaccacgggtggccgagatacgcttcgctctgtgcaatctcattcgtgtggtgcggaaatgcgttatcgatgccgccgcagtgaatgtcgaggtattcgccgaggtacttgatgctgatgccgctgcactcgatgtgccagcccgggtagcccacgccccacggggaatcccacttgagctcctggtcgtcaaacttcgactttgtaaaccacagtacgaagtcgctcttggagcgcttgttttcgtcctcttccacgctgtcgcgcacgcctacagcgaggctctcttcctccatgtttccgaaaacataatagttttcgagcttggaggtatcaaaatagacgttgccgcccgcgatatacgcatagcccttttcaaggagcacctctaccatgtggatgaacgtatcgatgcagctcgtcgccggaatgacgatctccgggcgcttgatgccaagcttttcgcagtcactgaaaaaagcgtcggtatagaactgcgcaatctgcatgacggtcttgtgctcgcggcgcgcgcccttgagcatcttgtcttcgccggtgtcggcatcgctggaaaggtggccgacgtccgtgatgttcatggcgcgggtcacgtcatagccgaggtagcgcaaggctttttccagcatatcctccatgatgtacgagcgcaggttgccgatgtgcgcatagtggtacacggttgggccgcaggtgtacattttgactttgccggcttcgtgcggaataaattcttcttttttctgtgttctcgtgttatagagctgcatacaggtgcttcctttctgcttattcttccttattcttctccgctttctgtgcggtcagcttgcttttttctctgcggcagctgttcagctcgccgtgcaggcgctcaatttcaagccgcatacggcacatttcctgcgccaccgggtcggccacgtggatctgatccagcgtgctgttgtccatcacacgcttgccgcccacacgcacgatgcgcgccggtacaccgaccgccgttgcgttatcgggcacggcatccagcaccacggcacccgccgccacacgggcgttatcacctacgcggaacggccccagcacctttgcgcccgcaccgacgagcacgtcatttccaagcgtcgggtgacgcttgccctggtctttgcccgtgccgccgagcgtcacaccctgatacagcgtgcagttgtcaccgataacggtggtttcgccgatgacgacacccataccgtggtcgataaacagatttttgccgatcgtcgcgcccgggtgaatctctatacccgttttgcggcgcgcgcgctgcgagatatagcgcgcgataaatttcatattatggcggaaaaaccagtttgccttgcggtaagaccgcaccgccttgaagccggaatacagaaaataaacctccgcacggctgcgggcggcagggtcgcgcgccatcacggcgtcaagctccgcctttaacttagaaaacatgacgtaaacctctccttaaaaacaaaagccccgagcgcacaacataggcgctcgggggcgaaatgtaccaaaacattcatgatacaataaatccgcggttccactccggtttatcactcaaacggcgtaacgtaccgtacccgtatgcggctcactttcgctcaccgcatccgctcgcgaatgcacttcgcccggctcttttctgcggcggctttcagcccatgacctccgctctctatcgactgcccccggggtactcgttcggtctcagcgtttgctttatgacagtattttaacacagcccctttaaaaacgcaagtcccaagatcacctctccgcgccattttatgcggcttttttcttttggtgatttataattcacctattttaacaaactaaatataaaattattgattttatgcctagatacagtcttgacatatattataaactatgttaatatattttcgacataaattctaaaaaaggtgagtccaatgtccaatgtataaaactgtgtatatttatcaataatcaaattcaaattgtttatatggaggaaaactcatgaaaaagatactcgcgcttgttttagttgctgttctaattctcacctgtgcaattattcctgcatccgcaaatgaatccgataactcgcttatccaaccccattatgaagtagtctgccctggtggagctcagcatataatggtagcaaaaggcgtagcacaagtttatacaggaaccttatacaatccgggtacacttatattcagtggatttgcatggaaatgctctggctgcggcatgatgctcggcaccgagggcagtcctctccgtagtggcgttattgggcgctatgcaatcaataattgctcctatactgacactatggcgctgttttatggcggtgtcaccgacactttttatgggaatatcaaaacagactccttctggaagcattttgctttcacgttataaaaaacctctaaagcaatttcttcatgcttccttttgaaattacttgaaaacgagggcgaatttaatatgtttcataaaaaaatcagttattttctcgttcttactttttgctttcttttgtttttgccgagttgttcaaataatgtcgatacacctgaacaaagcattcaacgtgttttaactacaattttcacctgtccagacaatgaggcaaaagaatacggtaaaatactaaataaaaacaaatattctttagaacaagaaaacagccaaacggaaattgcagaggcagaaaaacgtatgcaagaacatctatgccaaaaatacagcaaagatgattttacagaagcctattataattcattatttaagcatctatatacaagtctcgcctttccgactatgtgcattctaaatgaagctgaaatatcgcccatctccgttactgtggaaaaagatactacaaccaatatttacctttataccgccaaactaaatgtgacaaaaggagactccaatcctatagaaatcacacagaccggaagagttcaaactgatggtgacggacagattgcttttatcgatttagatgattccactctttttaacgccctttcttaaaaatcaataaacacacaaaaacagggtacgcacttttttacagtgcataccctgtttattttagctgtgattcaaaaattagagctgctcgtcgatgatctttgccttttcaagcgcacgcttctggagcagtgcgtcgatcttggcgtgcgggtcaagcagggagctgatggaagcgtcgtggttcaaagcggagatgaagtaagcgatgtacttcgaaacgtcgacttcatggaaccacgggcgattcttcagttccgggttaaggtacgtcaggttgctgccgaagatgccgtcgatgagaccctcttcatacgctttatcgaactttgcgaggccgttcgtgaagatggcatacgtgccgtaagcgaagaagcggcgtgccttgcgggccttgacgttctctgcaatgtcgagcacggactcgccggaggagataatgtcatcggcaacgaacacgtccttgccctcgaccggggtaccgaggtactcatgtgcaacaatcgggttgcggccgtctacaatgcgggaataatcgcggcgcttgtagaacatgcccatgtccacaccgagcacggaagcatagtacatgttgcggttcaacgcaccttcgtccgggctaacgatcatgaagtctttcttatcggtggaaagatccgggaagtccttgaagagcttctttaaaacctgataagtcggcatcaggttatcaaagcccataaccggcacagcgttctgcacgcgcgggtcatgtgcgtcgaaagtcaaaacgttggaaacgcccatctgctgaagctcctgcagcatgtatgcgcagtccaaagactcgcggtagctgcggcggtgctgacggccgccgtaaagcagcggcatcacgacgttaacgcggtgtgccttaccacttgccgcctgaatgagacgcttcaaatcctgataatggtcatccggggacatgtggttctggttgccgaagtagttgtaggtcaggctgtaattgcctacgtctacaacaaagaacaggtcatagccgcgcacggtcgacttgataagacccttgctgtcgccggaagagaaacgcgggcagctgttttcgatgatgaacgtgtccacatccataccggcacgctttgcccaacgcaccagatgggcctcaaccttttcggaaagctcacgcgcaccggcaagcggtacgatgccaagcggtgctacgcgattctctgcactgaaaaacgtctgtgattccattgccatttgattactccttcaaactgcatattccgttatttgcctgtccgttttacacgaacaatgtcggctcttgtctatttcaatatagcacaaaatagcgagaatttccacagcaaatacgcaaaatattaaacttttgttaaatccgataagagggcaatgccaaacggagcgagtttgattgaatttaccgtttgatctgtaccgtacaacttgtagtcgcgcggcaattccacggtttttccgctttccgtgtagttttctacaaaaatgatattctccttttcgccgtggcggatgtgtgccgttacgccgtgcggcagggcgcaatcgagcgctttttcaatgtgcagcgtctcaatcatttcgccgtacagtacagaaagcatatcgctgccggtacgggccgcaatgtaatacgcctcgcccttgccgaacttgtttttcgtcagcgccgcttcgcctgcgtagaaatccttttcatatgtgccgagcacctccgccgtcagcgggtggatacgtgcacaaagctccatagcatcgtaacggctgccgttaaacacaatgccgtttttcatgccgtccggcaggctgtcgatttcttcgttccacacgccgaacacgtccatcatgtcgccggggagaccgcccattttgcacaggtcggtatcgtccacaatgccgctccagtacgttgtgacgagcgtgccgccgttttcgacgaacttgcgcatcttcttttcaaagcctgcgcggtacatatagagcatcggcgcaatgacaagcttatatttcgagatgtcgccgtccatatcgacgatgtccacctgcacgcccttatcccagaacggacggtagtgcgtcaagagcgtctccacgtatttttcgtctttatccttgttgcgcgggcccgcggcagcatccagcgcccagcggttttccacgtcgtacacgatggcgacctgcggcttgacttcggtgccgtatacgtcgttacgctcattcatgctcttaagctcagcgccgacggactgcacatccttaaacacacgggtgttctcgttcgtgacggagtcgaacacgccgccatggctgacatggtcaacgaccgcgccgtggaacttttcgcaggagccgcggctctttctgaactggaaatactgcacggaatttgagccgtgtgcaaccgcctgcatggaggaaagcaggtgcatacccgggcgcttcagcatactgatgggcgtccagttcgtcatgctcggcgtgctttccatcaaaaggaagttttcgtgcttgatcgaacgcatcacgtcgtgcgtcatcgcggaagagaccgcaatctctacgttgtcggtcgtatgccactgcgggtaattgtcccaggaaacaacatcgagctccgggccgaacttgaagtaatcgaggccgtcgtagaagcccatcaggttcgccgtcaccgggatatccgggtttacttcctttacggcgtcgcgctccattttcatgaaatcgacggtctggtacgtgacaaagcgcttccaatcgagcatcaggccgtgcacgttcatttcgccgttcggctgcggcgcgtgaatctggtcccagctcgtatacgtgtggctccagaagtccgtccaccacgcgtggttcaggtcgtcgagcgtcttatacttctttttcagccaatcgcggaacgcctgttggcacagcgggcagtagcactcgccgccgtactcgttagaaaggtgccacaaaatgacgcccgggtggtttgcaaagcgctttgcaaggcgcttatccatctcgcgggtcttctctctgtacacgggggatgtatagcagtggttatggcgcgcgccggaaaggtcgcgcacaccgttattctgcacacggcgaatctcctcatacttttcgctcatccaaagcggctttgcaccggacggtgtggccaacacggtataaatgccgtttttgtagagattgtcgatgatcttctccagccagtcaaagtcgtattctccctcattcggctccagatgtgcccaggagaaaataccgaccgacacgcagttgatatccgctttcttcatcagctccacatcctgcttgagaatctcggggtagcgcaaccattgttcgggattataatcgccgccatgcagcagcttcggaaatttcggtgtaaggggtctcataataaaatacctccgtcagcgcgacttcccgcgcgtaatctacacccagtatacaggttgtacggacaaacttcaagagtgagtttcacattcttcattctttagtctttgccgcgttcttatgcgcatgtaataaagaaaagcgcacagattttgttttctgcacgctttttagcttcatatttttctgaaaggcttcttttattcgcccgctttactttggcttgtgtcaagttctctcgtcagcttatgcattctcaaaaaatacgtcgtgacaagcagaatagccgcaccggcccaagcagtgatctccgcatagaaaataccctcctgcccgataataagcggcagaaacaacgccacgccaatacgcatcaaaaattccatgatgcccgaagccatcggcatgatggtatcgccaagccccatcagcgcggagcggtaaatgtgcagcatatagaggatagacagacaaatactcatgatattaagatagtgtattgccacctgcgacgagatcgacacttcctccgccgtgccggaaataaacagtgcgatgccgtattttccgaaaatcagcacaaaaaccgtaatgacgaccgaggtcagcaaagcgatccacgttgcggagtgcataccctttttcacgcggtctaaaagccccgcgccaagattctgcccgacatacgtcgtcacggcgtagccgaacgaaacggcggcaatctccaaaataccgtacagcttattcgttgccgtaaagcccgccacgaacagcgtgccgtagcggttgacgaccgactgcaccaccatgccgcccacggcgatgataacattctgtgcggcgaccggcgtaccgagccccaaaagacgctttgctatttccggattgagtcggaaatactcttttttcaggtggatgaccttcacgtgcagcacagcgcgcaaacagtaaagcgctgcaaaaagctgtgcgatgaccgttgcgacgaccgcacccgcaatgccccagtggaacaccataacaaacagcagatcaagcccgatattcagaatagatgcaatgaccatggcatacagcggcgttttgctgtcgccgagcgcacgcaggatgcttgcaagcacgttatacgccatgatgatgggtatacccgcaaacatgatgcgcaggtatgtgaacgcgcctccgatgatctcctccggcgtgttcatggcgcgcagcacaggtgccatggcgacttggctcagaatgacggtcaagattgaaatgactgccgaaagcgagatcgtcgcgccgatggcgcgattgaggccctcgtggtcttccgcgccgaaacgctgcgccatgtaaatggaaaagccctgcgcaaagccttgaataagccccagcacgagccagttcagccagtccgccgcaccgagcgccgccagcgcgtttacgccgagcgcctgacccacaatggcggtatccaccaccgtgtagaactgctgaaacacgttgcccagcatcagcggtatcgcaaaggtgaagatcagctttgcagggctgccttttgtcatattttgaatgcgttctgtttttgccataaacccctcatgatttcgccgaaagtttttccggcaatttatgaatacgaatataatatgtcacgcacagcagtgctgccgcgccgaaccacgcggagacctctgcaatgcagatggaaagaaagcccagattgaacactttagagagcacgagcacaacggaaatgcgcagaattagctccagcgcgccggagagcatcggcaccaccgtgtcgccgagactttgcagggaaaagcggtagacgaacagcaaacccagcacccacatcatcgcaccgcaacacagcaaatacggatacgaagcttcgatgaccgcctgctccacgccggagacgaacaccgccgtcagttggcggccgaacagaatcattgcgccgccgatgaagaaatcgacgatgagcaccatcaaaatgccgcggcgcacgccgactctaatgcggtcaacgcgtcccgcgccgaggttctgcccgacatacgtgccaagggataacccgatgatgttgcacggctgttccgcaagaccgaagattttcgagcccgccgtatatgctgccacaatcgtagagcctaaaccattcacaataccctgcaagatcataccgccgatcgccgtaatggaattcataattccgaccggcaaaccaagcttcaataagccaaaaataataggcttatccatgcgcttttcgctggctttaaaccgcaaaaccggcatacggcgcaacacgaaaagacacatcaggccggaaagcagctgtgccaaaacggtcgcccacgcagcgccggccacaccccatttaaaggccatgacaaacagaatgtccagcccgacgttcactgccgagctgatgagaatgataatgagcggcgacatgctgtcgccgagcgctcgaagaatactcgaaagcgtattgtaaaacaccgtcgtgaaaataccgatgaaaataatgcggatgtacaaaagtgcgtcgtcgaaaatatcggtcggcgtacccatcagtgtcatgagcgggcgcgagaaaatgagacttaacgccgtgatgaccgccgcgctcataaaaccgaggtagcccgcgttcatcaccgtgcggcgcatgtcgctttcgtcgcctgcgccgaagcgttgcgaaatcaaaatggaatacccgtgcgtcaaaccgttgatgaaaccaaaaataaagaaatgtaccgaacctgtggaacccgccgccgcaagcgcattgacgcctacaccgcggccgagcaccatggcatccgccacagagtataactgctgaaacacattggcaacaagcaaaggcagtgcaaatgccaacaaaagctttaccgagctgcccttcgtcatattgcgaaccacaaaattgctcccttcaaaagacactttgattatcattatatcggataaaatgctgcaattcaatgcccatatgtcgttttcgaggggtataaacgccgaattttcctattcttttttggctaatttggcgctatttcggcttcagcaacaagccgtgtaaaaaagcagcgccatgcaaaagccgcacagcgccgcgtgaattttgttcaatcaaacggtgtaatcgaccgcaaccgccttttcgcgaactgtcgcaacataggtcttcaccgtgttgcagtggtacgggtctttctggtattcttcgagcgcctcggggctctcgagcgtaacggtcaggcagacgtcaaaagagcgctcggagtggaggaaatccgcaccggcttccacgtcaagtgcctgcggcacgcggcccttcatcgtcataaaaagatcgcgcagcttttcgcactgctccttggaattgtccttgagcttgatcattaaaacatgctttaccatttgaaaaacttcctttcggataaaattattgcatagctaaagaaaaccatggttaaaagttttgctcaagctttttcaaaagcttgcaggttcttagggcagcgccctacgtcgctttccgcagaaagcgaaatctttttgcgttcgcaaagtcaggaagggaggacgaaacttccggtggacgtttcgtccgagggaaaccctactaagggtttccctatgaacttgtaacacaagttcataaaaatcgaacccagtcttccccgaaaggcggccaaagccgcctttaaaaaatcgacttattctatctaacccccgaaaccgccctgtcgagcgcgcccaagtccttgtgaatccgcacatcgcgcagaccggcggcttcaaacagcacctttaccgcctgcccctgcgtctcaccgatttccacagcaagcacgccgttcgggtgcaattttttcgcccaaatatcgcagatcgcacggtagaagatgaggccgtccgcgccgccgtccaacgccgttttcggctctttttgcacttcgcgctgcaaaagcggcagctcgcttgtctcaatatacggcgggttcgacgcgatgaaatcgaacccatccggcagcgtctccgcaaaagctttatctaacatgtcaccctttaccgccgtcaccggcagctccgggtaacgcgccaaattctcgtttaaatagttgaatgcgctgtcgtacagctccacttccgtcacttcggcgtgtgcttctttcgcgatggaaagccccaccgcacccgtgccggcgcaaaggtcaagccccttcggcaaattctcggttttcgacagacgcttgcacactgcttccaccaaaacagcggtgtcctcgcgcggaatcagcacgccctctccgcaggaaagcgtcaggctcataaagtcccactcgccaagcagatattgcagcggctcgcccgttttgcgcttttcgagcgcggaaagcaccgcttgctccgcttcagactccgccggcttatcgccgtgcagcaataactctgtgcggttcgcgccgcagaaatgctccaaaaggcacgcggcttcaaatgtcgggtcttccgtgacgggttcaaacgccgttttcgctgcgcggtacaactcgttcagcgtcatcggataatatcctcgccgttttccgggataaccgctttcatcgccgcaatagcggcttccatcatcttgtcggtcggctcttttacggtcaaacgctgaaaccacaggcccggcgccgcaatgatgcgcgtcagcacgttatcgtacttgccgcaaagcttgatgagctcataaccgatgctgacaacgatcggcaggcacaagagcttacagaatgtgcgcaggaacggattggaaaacggaatgaaaaaaccgatgatgatgccgagcaaaagcattaagatcataaagctggagccgcagcgcgggtggaagcgcttttgcttccgcacattttccacggtgagcggcaggtcgttttcatagcagaaaatcgtcttgtgctccgcgccgtggtagcggaatgtgcggtcaatctccggcattttagagatgacaacaatgtacagtacaaaaatgacgatacgtaaaaggccctcaaacaccgaacgccaaccactgatgccgtcgcccgtgagcatcatcagcccgttaaaaagcaccgccggcaaaaagaagaacagcagcaccgcaagcgccacgcccagcacaccgcccacggcgacgaccgcattcatcaccttgtctccgaatttcttttcgagccacttttcaaatttcgagggctcttcctcttcctcgccgcccactttatccgccgaaagcgtcagcgccttcataccgaggcgcagggtatccaccatagagaacacgccgcgtataaacggctttttcaaaatgggatatttttcacgcagcgacggcgtggaaacctcctccgttgtaatatttccggcttcgtcacaaaaagccgctacgtttttcttcggaccaaccatcaaaatgccctcaagcaaggcctgcccgccgatagatgttatgcgttttgccattctttctccttttgcttataaacaatatttaatcctgttttctctccacgacctgcacctgcgcggtggcggtgggaatctgcgttgtattggaaagctcgggattcatctcaagctttttcatggtcggtatcgtgatgatgaccgtggtgcccatgccttcttcgctgtcaacatcaagcgagccggagtgcagctccatgatctcatttgcgacggcgaggccgatgccgttgccgcgcacgttttggtttgctttgtagaacttctttttgacgtttggcagatgctccgccgggatgccgcagccactgtccttaatgatgacgcggataaacccgtcgtcctcatacgcggaaacgcgcaccgtaccaccgggattcgtgtatttcaaagcgttgtcgatgacgttgatgaacacctgccgcaggcgattcacatcgcccaaaatcggcgaaagcatcgtgtcctcctcatcgtaaatgaggtttttatgctccgttcgcgcacggtcggtgaacatatacacggcctcatccagctccgccaaaagatcgatcttcttgaggatcagccgcattctgccgctttgcatgcgggaaaaatccagaagctcctccaccatgccggaaagacgttctgcctcgcgcacgatgacgttcatgcccttatcatacgtttctcggccgatgccgcctgtttgcagcgtttccgcccaacccttaatagccgtcagcggcgtgcgcagctcgtgcgaaacagaggaaatgaagtcgtttttcattttttccgctgtgccaagctccgccgccatgtcgttgatggagtcgcacagtgcgccgagctcgtcgtccttctctttcttgacgcgcacgtcaaaatcgccctttgcgattttttccgccgtagcattgagttcccgaatgggcgtgataatagaccgcacaaaatagatgcccgaaagcgtgacgagcaccaaaataagcacgccgataccaatcaggaccagcacaacatacgtaatctgccggtctgcgcgctccatagagacgatgtaccgcaccgcgccgagcaccgcgccgtttgcgccgcgcgccacgcgcgagaccgccatgaccttctcgccgctcgcgagcttgccgatccaatagccgtacccgttttcgctgtgcaaggcgctttcaaaatcgggcttgctctggttttggtccggcgcaaagccggaggatgtagacaaaatgctgcccgaacgcgagaccgccatgacctccatgaggtctttatccgggaaattttcggtgtagcttctggctgcagcgttaaactcgcttacggttttcatgctgccggaaagcacggtgggcagctcgtcgctgcggccgatgagcgtcatttgtatgccgttataggcatagctctgcacaacgaaagaaagcgccgcaatacaggctgtaaataataaaatcatcacaccgaggctgttaaacagccagcgtcttgcgataccttttttgaacacgcgcttttctcctttctgtgcttctttttgtggaatagcctatttttatcattttaaatgacttgccttgcaagtcatcagaaaacccatgcaactgggttttctgcggttcaacagtccaccggactgttgaacctactttcctggttttttattaggcaaaaagatttcgtcgtctgcggacgacgcctcagggccttgccccgagaccccataaactttctgaagaaagtttaatcaaagacttcattcgtttgctttcacgcagtctcgttcttatttatcccaccgatagccgatgccccacacggtgacaacatgtctcgggttcgagggctcgtcttcgatcttcattctcaatctgcgaatattcacgtctacgattttttcctcaccgacatatccgctgccccagacgtgctttagaatttcggagcgttttaacgccttaccggcatttgagatgaagtattccatgatctgaaactccacctgtgtcagctccacggggttgccgtcttttgtgaatgagcggttgcgcaggttcagcacgaagcggccggagcgcagctcttcggagaaattcggctctgcggctctcgtaaactgtgccacacggcggtaaacggcgtccacgcgcgccacgagttctgaggggctgaacggcttcgtcacataatcgtccgcgcccatcatcaggcccgtcaccttgtccatttcctgcgttttcgccgtcagcatgatgatgccgatggtcgcgtttttctgtcttaattccttacatacggcaaggccgtccagactgccgggcatcatgatgtccagcacagccacgtcaaaatcgccgccggcctgctcgtacacgagcaaggcttcctcaccgcttgcggcttccacgcagtcgtaccccgcgcgctttaaattgatgaccacaaactcgcggatattctgctcgtcctctgccaccaatatctttttcatgttcgtttcccctttctgtcccccattttcagtctatatttattccaacacttcaaatccgctttgcagcgttttttcgtcgctttccgccatggaatcgtccaaaatgcgcagcacatacacgcgcccggcggagctgctcaacagaatatcttcgtcatcctgttctttttccgcccagtcttcctccgtatatacccgaatggagaacttgtcctcccgaccgagataattgccgttaaagccgatctgcgtatacgtaaagaatgtcgctgtgcgagtcacggtgtcattttggcagccgtagttatcctcgctgctcggcaaaaacaggttgtagttttccgccgtattcaaaatacttgtgcacaccggcgtcaacgtgttatcctgtaagctatacgtgttccacgtgatgacatacccggtggaatccgccgtcgtttcgctgccgtttatcgtcaactccgccgttggaatctccaaaatgccgtctttattcacatcgcgcgagaccgccgcggccgctgttggccgatccgtcgcgttttcttcgttcgacagcggcgaaatgagtctgtccgacgcttcgtcatacccaatgacctgcgtcagcatgcgcccgtccgctttcacgccgtccagcaccgctgcgcgccgccaggaatttacctgcgaaaagcttacggaggtgtaacgcgtcaccgccgcatcgagcggcacggttttggagacatacggctggtcgccgtcaaagcggtataacccgccaagcgccatgatctcctctccgctcgtctgcgctgcctgcaaaacgaacagctcttttatattgtcgctgtcaaaatccgtcagcagcatttcgctgtatgagaccgttgtcatggagaattcgcggatcgtgtctccgtccacataataaaccgaaacgcttgccgtcgccgtgagcggatctccccagcccacgatgatctcgtccataccgtcgcccgtcaggtcaccgaaaaacaccttgtccacctgcgttgccgccgaggtaaaccgcgccatagagctccaaacaccgtccgtgtttttcttaaaaaattccagccgcgtgccgcccgcgtcgccgtttgcacagaagctcacgacctccgaagtgccgcacccgtccaaatcgcgcgagatgatcgccgagcggtaatcgccgtatttcgggtaaacgagcgtcacgtcacccacgccgccgcccatcagggcatatatcgcttctctgtctgctgtcgtctttggcggagacatcagcgcttgcgcatcaagacccgtcagctcgctgcaccccgaaaaagaaagcgccaaaagcacggcgagcaccgctgcaaaaagttttttcagttttccgcgcatcgccgtcacctcctgcgcaaatttacaatatcaatataagtatagcatatcccccgcaccgccgcaagcagtcaggggcgctttggcgtcatataaaaattaaatttctgtgacagcattgagaaaccggcgcgcgcgtggtaaaatggagaaaatatttcgaaaggattccgcatgaaacaaacaatgcacaatacccgcgtgcgatgggtgctcggcattctcattgcgctcacgcttgcgttcatctggagcaactccatgcagagccgcgcggtctccggcggcatgagcggctccttaaaaacgtggctcgagcagcttctgcacacggaaatcagcgaatttttactgcgcaaggcggcgcatttttcggaatacggccttctgggtgtggaattttcgcttctgctcggcctgcagcacgataaaaacggcaaaaatctccagtgtgggcgcaatcttctcgactttccactcatcggcatgctgtgcgccgttacggatgagaccattcaaattttctccggccgcggttcgcttgtttccgatgtgtggatcgacgccgccggcttttcgaccggattctttttgcccgttctgctctttctttttatcaatcactgtaaaaaagccgggtaaccggcaaccggaaaggataaataccatgaaacagcatattttaaagaaggttcccctcttcgtcaccgtgtccgttctgctcgcgtgcatcgtgttttccggctgcgcgggccgcaccgtcatcacagatgcgcaattcaagtccgcctgcgaagctgctgactgcgaagtaacggacgtttccgaccagtttgacagcagcgtcatcacaaaagcgctgactgtttcgggcgatgattactccttaggctttttcacattcgcttccacggacagcgccaaaacgaactacgcgcagatgctttcaagcgtcaggacctccgagggcaaggcggtcgattccagcgaatacaaccgctacacgtataaaggcgacgacctcacaacggtactctaccgcaacggcaccacgattcttttcgccaccggcgcggataaggacactgtaaataaagtcgtaacagcattgggactttaacttttaaaggctcgtcggcaaaaccgacgagcctttaaaaataccttgctatgcgggcagcggcgttcgggatgaatgtttccgcccgctctgctatataagccgccgtcagcgcacccgcgccgacgtacttcccatactccgtaaacaggctgcgcgccgcgatgcgctctgaaaaccgcaccgtcacgcacaggaagaaccggctgccgatccgccccagcgccgaagaaagaacatggagcgtgtgcacggcacgctccaccgcatccatcaaatgccctacggtctcaaagcaaaacgtcagcggcacgggcggcgaaacgatacgaatgccaccacccccctttccgttcccaaggcacacccgcaggtgtatcttaaaccagtttacgccaaaggcaggtacaccgtgccgatttttctttgaaaccttgacattttctttttacgttctgatcattaccaaagttagttatgatctgacatcggtgaaacgctgaaccggccgcgccccggtgtaacccgtaccgtaaaggaaatagagcaaaaagactacctgcaaaagaccgcttccgaggaagacggtcgcgtgacctacatttccgcaacgaaagcttcagcggtaatgtaaccggcacgttaagcaccggcaaaacagacgtcccgttccacagcggcacaggcacatgcaaagtcagcacgctcagcggcagtatccgcattaaaattgcaaaattacgtaaaaaatctctctcggcgcagccgagagagattttcaatttcgaaccttattttactttatttctgaacttcggtaccaacacggtggcgagcacccagaacagctcgtagatgacgagcgcaaatgcggaaatctgctccacgcccgcaacgaacgtgaggaacgccacaagcacaaagccgatgacgaccgccgcgttctgcatggcgacgatgaagctgatgttcttcttttcatcaatgcacgtggaaacaaggttcatcatggattccacacgaccctttgtggcggcataggcgtccacgcggtccgcagtgtcgttcacaaggtggtctgccgggccgtcttggcccgcgccgatgacattcaccgccgtggcgtcaatgccgaacaggcgcgaaatgaactgcggcgtaaggttcgggtctgccgaacgcagaatgagcgaaacgccgttcatttccatgttctgcagctccgctttcttcttacggtctgcgttataggtcaggatgaacatggcgtaaagctcgccgcccattgcaacgtacaagatctgtcggctgcccgtcgtgtactgactctccacattttgctccggcgcttccacaccgtgcgcagtcaaaagcgtacgggagccgatgagcacctctttgccgtccaccgtgcccacaacgccgtttccggcctcaaatacggccttttcgacctccggaagctcgccctcatgctcgctgaacacctgctcgaacacgccgcaaagcgggccgccgagctgctgcaccaacgtgccggcagccaaaacggcttcttcaaggccctcctgcttaaacggcttcaccccgttcaaaacgaccgtgccgcgcgggaaaagctctgtggaatcaaccagaacggcatttacggcgctcatgcgcttgataccttcatagccggagaccatcgcgccgcggcggcgcaaacggtgggaaagacggctcaccggcaggtttacggccagcatgttcatcaccgctacacacacgcagcaggaagccgccaaagccgtaatggcaagggacgcatccttcgtgatgacaagcgccaccacgcacaaaagcagcgaggaaatgaggcccaccggcgccaaaacctgtgaagaggtctctgccgggtccggctcataggaaatttgtaagaagcgctttaagaagcccgctttctgctgatacgcgattgcaggctgcgaaatgacggaggaacccgccatttttaaagacgtgttgtaatcgtcaaatacgcgcaccgcatatttctgctcgcgggaagacacaaagcggaaattcgagtggatgcggcgcagcatcgtcagcttgccgacggtattcaggaacagaatgcccgccgcaataccggcgtaaaggtggattttacccatgctgagcgcagccggcgcaaacagcgtgcagagcgtctgcacaaaaaccgccacacaagctaccgcagcggcagaatccgaattcgcgcggaactcaaacagtgccttcagaccgtttaaaatcgttttcgcgcagaagccgatggccactagaagcagcacaagcgataagatggtgtagcccactgcaccggcggtctccgtgttattggcattgaagccggattccgcaatgagcgacgccaaaatgagcactgcagtgctcacgcccgttgcaagcatgcggattgtcagctcgcgcatcgtcgtgcgcaggtcgtgcgccacgctctttgcgtctgccgggccggtgtaatcgtcgatgagctcgtcgctgttttcggcggcttccgtgttttcgggcgcttcgtccggcttttccgcaaagcgaattttaaagcggtgcgcaccggccgcactgacgttctcgtcgtcggaatacacgcgtgcttcgctcagtagtgcactttgcaaaacatccgcattgataatgtgcaccggcaagtcgcgctttctgtactgcgttacgtccgttaccggcacggagatcttctgctgcgcaggctctgccgcttcttcgccggcgttctcggcgctttccgcagcctgcacattttccgctttcggcgcttgtgcttcgggcaactgctcgccggaagcaatgtccatgccttcttccgcctgcggctcttcctccggctccgggccattgcttgaaatatccttaaacgccatctcgggcgcgtcactttcttccgttttcggcgctgccgcagcctgctgctcggcattttgcacctgtgcagcctgctttgccgcgttttccgcctgcacagattccagaatgcggcgcacggaatcctcgctcacctccggcaccacctttgcctgctgcaaaccaaacgtctcattttcaaggtcaagcttaatctccatcgtgtgcgtctgcgcgtcctgcagcatcgccgtctggaaattctgcaccttgtccttcgtctttttgttttccggcaccacagcgttcgggtcattcatcgcaacggagaccggtaccggggccacaatgcccagctcgtcttccacagcggaaagatccacaccggccgtctctacggcctcggccacacgacggcgacgctctttctgcaggcgctcaaagtcctttgccacttcgtcgtcaagctccgcggtgttctcgtcaaacagcttgcggtatccctcgtcctgcgtggaaatctcccctgtggcatcaaacccgcgggtgtattcgtcaatcggttttaactggatgccgtagtacatgtcttcggcttcattaaaaacctctttctgcttcttttcgcggcggcgcgcccaaaaaccttttttctctttcttctcttttttgttcttctttttctttccgggctcttcttcctcctcgtaggtatcccacggggagtcttcttgcacctccaccggctgcggttccgcttccggcgcgggctgtgctacctctgccgagacttcctctacgggctgctccgtttcaggctccgtcacagcgtcgggttcttccgtcaccccgggcgttgttttttccgactcttccggcgcgccgttggctttcgccttgcgctccgcttccaatatctcgtccaccgagaatttgttctcatcgttcatggttttgggtcctttctttttcgcctcagcccttggccttgatgcccgcgcgctgccgcgcaatctcatagcaaagcacgccgcaggccaccgaagcgttcagcgaattgattctgcccttcatcggcagagaaacgataaaatccgatttttctttcacaagtctggacacgccgaagccttcggagccgacaacaagcgctgccgggccggagaaatcggtttggcaccaatccgtgccgtccatatccgcggcgtatacccaaacgccgcgcgctttgatctcctcaagaaataccgcaatattcgtcacacgcgccacggggacgtattccaccgcgcccgcagaagccttgccgaccgccgccgtaaggccaacgctgcggcgcttcgggataacaacgccgtgtgcgcccgcacattccgccgttctgaggatcgcgccgaggttatgcgggtccgcaatctcgtcgcacacaaggataaacggcggctcatttcggctttccgccagcgcaaaaatatcctccacctcggagaacgcgtgcaccgccgccatggcgatgacaccctggtggttttcgccgccgcacatgccgtccagcttacgggaatccacttcctttaccgggatgcccgcctgctttgccatgcggagaatggacgataccgaaccgtttttctccccgcgccgcacaaggatgctgtcgatgggtctgctcgctttaagcgcctccgtaacggcattgcgccctgctatgacatctctttctctctcgttttccatgaacaaacctattcctttccgcggcttcagaacacgtctgcggccgaaattcgcaatactatcgcagtatatagtagattatagcatacttatatttgccattgcaaccgaaacgcgcaatttagcgcggtttttgcaggcggtttttgcgcctaaaaccgccgtgtttttgggcagttttttcgccgcgctcttttcgtcattttgacggtgcttgtgcgtgttcattttactcagcataattattcattcggattgcatatcttctcacatcttgctgtatatgagccggcctttacatttatacaatttgtaatatgcacggcagaagtatacacacagcgagctttccacagcgttttccgtttaagctgtggaaaactctgtggaaagtgttaaaaacccgctttcggtgctctttttactttccacagcttttcacaatgtaaaatgttatgtaaactactccgtcgaaaattccgctttttaccgttttttcacagaatactcactataaaccgtgtgtaaaatttgcgtgaaaagccttgtgtttgcccgaaaaaacgtccctatatatggtgtttttgcgaaaaacagcgttttaattccaaattagaacgatttaggcgaaactctaggcggcgagattttccgtttaagcacattttgtgaaaaaaagcaaggcggcaggctttacacggttgttttttcacctaaaatcgtgtaaaatgaaaatagcgagcagaaagacaccggaaagctgcgcactttttagacgtgtcccacaaaaaagcggggccgcacaaaccgtaagccacggcaattaaaacaaaagacatttttcggataaacatgcactgtatacaactataagaaaagaggaacccaaaatgcgtgaagacatttgctctataccgatcagtgaaattttcgagccgaaggacggctgcccgttctgccgcatgcgtgacatgctcgaggaccgcatggccacctacattaccggcgcggccatgatggaacccgacgtgcgcgtggaaacgaaccgtctcggcttctgccaccaacattttgagcagatcttacagcgcggcagccgcctgtccgtcgcccttattctcgaaagtctcttggacgaagccggcaaagagatcctacccgagtacgacaagctcgcgccgaaaaaaattctcgccgccgcagatcgccgtgcgcacagctgctttgtctgcgaaaacgttgagaaaaacatgcaacatctcagcgccacggttatcaaactctggcagagtgagccggagttccgcacactgtacagcgagcagacgcatatctgcctgccgcattacagcttcattttggctgctgcgcagaaaatgccgcgtaaaaactttcagccgtttgcggcagaaaccaagcgccttgcgaaaaactatctcgataccgtcaaggccgataccacccatttctgccgcatgttcgattaccgcaatgcgggcggcgactggggcaattcccgcgatgccattgagcgcgccatcacgtatctgacgagccgagagcccaccgtcaccaccaaaacggaaggcaaaaaccgttgatgcgcttcaccccgcccgatggcgttttaaacctcgcccaaacgctcgactgcgggcagtcgttccgcttttatcccgtcacgcttgaaaacaacattcccgcatggcgcggtgtggcattttcccgcggactgaccgtctatcaagatgaaaataacgacctcgttttagactgcaccgagcaggaatttcgtgacatttggtttgattatttcgattttaacacagattacaaaaagtcccgcgaagtgctttccgctctgcaccccgcgctgaaagaagccgccgaattcgcgggcggcatccgcattttaaagcaagagccgtttgaggcgctgtgctcgttcatcatctcgcagaacaacaacattccgcgcatcaagggcattatagagcgcttgtgtctgcatttcggcgagccgtttctttatcataacgagacccgctacgcattcccgacaccgaaaaaattggtctcctgcacgccggaagaccttgctccgctgcgcgcgggctttcgcgcgaaatatctcgttgatgccgcaaagcgcatcgcttccggcgagatcgatttggaagccgtgcgcaaaatgcctcttcccgatgccaaagcgaaattgcagacgatttcaggcgtcggcccaaaagtcgcggactgcgctttgctctacggcctgcaccgcacggagtgcttcccgatggacgtgtggatgaagcgcgccgtatcgcttttgccgaggctttcccccgcagatttcggtgaaaatgccggcatcgcgcagcaatatttattccactatgtgcgcatgcaccccgagcttttcaaataaagaattcgtccgggaccggcggcaggtcatcgggtatcgccgccatacttctttttatgatcttcgccatttcttccggcgtttccgggcagccgtacaaaagccatttgcgcgtcacggcaaagtaccccgctttcacaaattcaaaatgatattccatgcagtgctcgctctcgatgccgagccgccgaaaaaaaggcttgaagacgttttcaaacagcgtctgatagcctttttccacttctgccgtgccgaatttctcaaaatacgcccggtaaaacgccctgtcgcgctttgcctcgcgcagcgtcgccgccacatatgcttcggagaagatattcgggtcgccgtgcatctcttcgtgtatccgctctacggactccgtccatttctcccctacgatcgctgtcagcagcgcgggtatgtctgcatagtgcaggtaaaacgatgagcggttgatgcccgtcgcctcacaaatttcccgcacggaaatttgatttgtttttttattgagcaccattttcgtaaacgccttgcggatgcgccggtcggtctccgcaaagccgcattcgcccgcaaaagtcgaaaatctcctctaaaaatcaactgaattttcatattctgtccatgactttttcccgcgcttctgttatactttaatatagaaaccaacgcagtataaggagacggtacgatgggcgcatttgtggaatttgaaaatgtatcgaaaatttataaaaccggcgacgtagaggtgcacgccttaaccgatgcaagctttgaaattcaaaagggcgaattctgcgtcatcgtcggtgaatccggcgcgggaaaaacgacgcttttaaatatcctcggcggcatggatacgctgtctaaaggcaccgtccgcatggacggacgcgacatcagccactttaaccgcacccagcttgaaaactatcgacgctatgacatcggctttgtcttccagttttataaccttatcccgaatttaacggcgctcgaaaacgtggaaattgcggcacagctgtgcaccgatgccatccccgccgaagacgtgctccgcgccgtcggtctccatgaccgcatgcagaactttcccgcacagctctcgggcggtgaacagcagcgtgtttccattgcccgcgcacttgccaaaaaaccgaagctccttctgtgcgacgagcccaccggcgcactcgattacgagaccggcaaatctattttaaagcttttgcaggatacctgccgccgcgacggcatgaccgtcgtcatcatcacgcacaatgcggcgcttgccgccatggcagatcgcatcatccgcgtaaaaagcggccacatttactccgttcgcatgaacgagcacatcacgcccgtggaacagattgaatggtaacgcgaagggagccggaaaacgcatgacaaaagcactcagaaaaaacacgcggcgcagcatttcgggcagccttgggcggtatatcgctatcctgctcatcattatgctgggtgtggcgtttctcacgggtctgcgagatacccgtcccatcatgtccgccaccgagaccgcctatgtgaaaaatacgaaactctacgatcttcgcctcatctccaccatcggctttgatgcggacgacgttgccgccgtgcagaaagccgacggtgtggttgccgccgcaggcagtgtgaatgccgatttcatctggcagcacgacaacaaagagcgcgtttaccgtgcacatatgctgacagataacatcaatgagcctatgctcactgccggacgtatgcctgaaaacggcagtgagtgccttatagattccagtcgcttttcggaagacatgattggacaaacgatcgaaatttccgactccaacgacgaagatacgaagaaaaacttcaaatacagcacctacaccgtggtcggccttgcagattctccgctgtacatccacacgctgcgcggcaccacgtcgcttggcaacggcacgctgcagggcttcgttctcatcccggaggacggcttcgatttcgagtattacacagaattatacgttacctgcaccgatgaattcccgctatacagcgacgcctacgacgattacatcgatacgttctccgatactgtcgaagccgccgccaccgcttccgtcaacgcgcgttttgatcgtctcacgtccgacggcaaagccgaaatttcagacgccgagaacgaactgaacgacaaaaaagccgaagccgaaacggagcttgccgatgccaaagcacagcttgacgatgcaaaagagaccatcacctccggcgaaacggagcttttcgacgcgaaaaagcaattggacgatgccaaagcacagttggatgcaggcgcagagcagattcagcccggcttcacttcgtgggaaagcgccctgcaaagcggctttgacgcatattacagcggcaagcagcaattagaggatgcccttgcggagagccaggcgcagatcgacgccggttacgcgcagctgcaggaaaacgaaaagctctacactgaaaaatatgccgaattcacatccggcaaagagcagtatgaagcgggtcttgccgccgcaaaggacgcccgcacacaaatcgatgccgcacgcgccgacttaaacaagaaaaaagcgcagctcacggcgggctttgccgcactcgacgaagcgcaggcgcagcttgatgccgtaaaagatatgctcgacccggcagaagccgaagcgcagcaaacggcgctcgatatgcagcgcgccgctttgaatcaaaatcagacgcaactcgatgatgccgaagccgtattaaacgaacaggatgccgccctcaccgcgcaggaagcgcagctcacggagaccggcaagcagctcgatgaagccgaaaccgctctctcgcaaatgcgcacgctgctcgatgtcggccaaaacgattacaccgacggtatagcacagcttgaatatcagagaaaaacgcaaaccgcaaagcttgacgaagcgtataactcgctcatcacgtttcaaaacggcatcaaagagtacaacgagggcctctcttcgtacaacgacggcgtaaaagagctcgccgacggcaaagccgaatacgaagacggccttaaagactacgaggacggcaaaaaggaatttgacgagcaaatttccgacgccgaacagaaaatcgccgacgccaaacaagagctcgccgatttaaagaagccggagctctacgttttaacgcgcgacacaaacgccggctacgtctcgtttgaaagcgactccaccatcgtcgaaaagctctcggggctcttccccattttcttcttcctcatcgcggcgctcgtctgctccaccaccatgacccgtatgatcgacgacgaacgcacacagatcggcacacttcgcgcgctcggatacagccgcggctccatcctcgcaaaatacctgctctattccggaagcgccgccgcactcggctgtgtcatcggctattttgcaggcggctatgttttcccgttcgtcatctggacggcctacggcatgctgtatagcattccgggtttcgtcatactgtatgaccccgtgttgtttgtcatcgcgcttgcggcgtcgcttttatgctcggcgggcaccacatatttagccctgcgcatcgagatgcagaacatgcctgcaaacctcatccgcccgaagaccccggccgccggaaaacgcattttcctcgagcgcatcacaccgctgtggaagcgcctgaaattcctgcacaaggtctccctgcgcaacattttccgctttaaaaagcgcatgatcatgatgattctcggcattgcgggctgcaccgcgctggtgctcaccggcttcggtatccatgattccgtcgcgaacattgcaaacttccagtttgatgatattcaaaaatacgatgtcagcgcgcagttctccgatacgctgaccgaagataaaatcaacgaagtcgaaagcgaccacaaatcggaacttgacgccgccaccgccgtgcaaatgacctccggtgacgtcacaggcgacagcatcacaaaatccgcttacatcgtcgcgtccgacgaccccgccatcaccgacattttcgatctgcatatcgacggtgagaccgtaccctaccccggcaaaggcgaagtgctgctcaccgaaaaacttgccgagctcaccgatatcaaaaccggcgatactgtcaccgtttccgtttcggacacggaaaaagccgagctcaaggtcgcgggtttagttgaaaactacgtgcaaaattacctctatatgacgggcgaaacgtacgccatggtcgccgataagggctacgagccgaaaacgctcctgctgcgcgtaaacgacagcgcagacgaatatgcgctttccgccgcactctccaaaacggacggcgtatcctccgtttccgtcgtcaccgatacgcgcaatatgatcgaccaaatgatgcagagcctaaactatgtcgtcgcgctcgtgctcatttccgccggcgcactcgcgttcatcgtcctgtttaacctcggcaacatcaatctgaccgaacgcgtcagggaaattgccaccatcaaggtgctcggcttccattccggggaaaccggcgcgtatgtgttccgtgaaaatatcattttgtccatgatgggcatcgtcgtcggtctgccgctcggcgttctgctgcacacatttgtgctcatgcagatccgcgtcgatatggtctctttcaaagctgtcattgcacccgtcagcttccttttgaccgttgtcatagtcgttctgttcaccgtcatcaccgacctcgtcatgcgcaagaaaatcgccaaaatcgatatggcggaatccttaaaatcgatcgaataaagaaaagctgcaccgcactactgcgcgaaaaaacgaagtaaacatttttcgtaaaattcttgccgcagctccctcggttttctccgttttgaactattatgaagcgagcgaaaatcctgtataatagaaaccgttaaatggtttatattggaaacgcacattcctcccgaatgataacgaacaacacattagcaggctctttatcaaagtgtcgctttcagtttatcattcaggaggaatttttatgcccaaaaacaaagtacaggacgccgttttcaccgctatcatggctattatcatggtctacggcatgattgtctacaatgtcgcgctgaacaccggcggtgtcacaagcgaaacctttctgcttgccctgcatgaactgcccattatggcgccgattgcgtttattctggaatttttcgtcgtcggcaagcttgcaaagcgcctcgcattttcgttcatgaaacctacagaccgcccgcagttcatcacctatgccgtttccatctgcatttgctgcatcatgtgtcccatcatgagccttattgcgaccatgctttttaaaaacacccacaccttcggcacgtttattcagacatggggcatgaacttcccgtgcgtcgtgctgtggcaaatgttttactgtggcccgctcgtccgcctgatttttcgcttgattttcagggaaaagaaaagtaaataagcatagaaaaattctccctcggctccacagccaaaggagaattttctttatcccggcaaaatttccgccaaaatcgcattggagaccaaaaagccctccgcggtcagcgaaattcgctcgtgatctgcatgtatcagatttttcggcaaatgcttacaaccttccagaaccccgtcaaacagcgcaccgccgttttcaaatcgtgtctcgcaaatctttctttgcagcccctcggtcagccgaagcgacagcatcgcaaattccgaaaagccgccgccggcgccgtcgtctgtgggcgcattgccgttaaaaaagccctctaaatcgcgtgggaaataaaatcgcctgccctccataaaggagtgcgccgcgggaccaagtcccaaatattccccgcaccgccaatactgcaaattgtgtcggctctctttgcccggccgcgcaaaattgctgatctcatactggccgtacccgtactttttaagctcgtttacggcaaacaaatactggtctgccgtgccgtcctcatcgggcagattaagctcttgctttgcaaacggcgtaccgggctctatctttaaaatatacgcggaaacatggtcggcctcgagtgcagcgcaaaaatcgattgagcttttcagtgtctccaagctcgagttcggcaggccgagcatcaaatcgaccgaaacattgtcgatgcccgcttctcttgccgctttcaccgcttcccgcacggtttccgccgtgtgcctgcggccgagaattttcaattccgccttgtttgcggactgcatacccattgaaatacggttgaacccgccgcgtttcagcgtttcaaaaaatgaaacgtctacatccgccgggttgcactccgtcgtgatttccgcgttttcggcaacattaaactgttctttcactttttcgagcacgcggcacagtcttttcgcaccgaacacactcggcgtaccgccgccaaaatataccgtatgcaacagccgttcgccgtatttctcaccgtacactgcaagccgcgcacacagcgccgccaaatagcggtcaaacacttcatcttcttccggccgcgcggagtagaaatcgcaatacgggcacttgcttttgcaaaacggaatgtggatatacagcgaaaccggtttattcatcaagcttcagaaccgccataaacgcctcctgcggtacttctaccgtgcccagctggcgcatgcgcttcttgccttccttctgtttttccagcagcttctttttacgggtgatgtcaccgccgtagcacttcgccaaaacgtccttgcgcatcgctttaacggtctcacgcgcgataatcttgccgccgatgcacgcctgcaccggcacctcaaacaactggcgcggaattttctccttcagcttttccaccatcttgcgggcgcgcgggtacgccttttccgcgtggatgataaacgaaagcgcgtccaccacttcgccgttcagcataatatccagcttcacaagctcgctcttgcggtagccgatgagctcatagtcaaacgacgcatagccgcgcgtgcgggatttcagcgcgtcgaagaaatcgtagataatttcattgagcggcagctcatagtgaatatccacacggtcggtgtcaatgtatttcatatccttgaagataccgcgtctgtcctgacaaagctccatgatgttacccacaaattctgtcggggagtaaatgtgcgcgttcgcaatcggctcctccgccagtgcaatgtgcgagggatcagggtaattcgtcgggttatcgatggaaagctttgtgccgtccgtctttgtaatgtggtacacaacgctcggcgcggttgtgatgaggtcaaggttatattctctctccagacgctcctgaatgatctccatgtgcagcagtcccaaaaagccgcagcggaagccgaagccgagcgccacggaggtctccggctcaaacgtcagcgccgcgtcgttcagctgcaatttttcgagcgcatctctaaggtctgcatagtgtgcaccgtctgccgggtacacgccacagaaaaccatcggctgcaccgcacggtagccgggcagcggctctgccgccggtctgtccgccagcgtaatggtgtcgcccacgcgcgcctcgcgcacgtttttgatcgatgccgtaatgtagccgacttcgcccgcggaaaggctctttgcgggctccaaagacgtcgcgcgcagaatgccgcactccaccacggtgaactcactgcccaccgccatcatgcggatggtgtcgccggggtgcaccgttccctctttaatacgcacatacgcgataacgccgcggtatgcgtcatagtaggagtcgaaaatcagtgcgcgcagcggcatgtccgggtcgccctgcggtgcgggaatatccgtcacgattttctccataacggctttgatgttgaggcccgttttcgcgctgatgcgcggcgcgtcctctgccggaataccgatgacgtcctcaatctccgccgcaaccttgtccgggtccgcggaaatcagatcgatcttgttcaataccggcacgacctcaaggcctgcgtccaccgcaaggtacgtgtttgcaagcgtctgcgcctcaatgccctgagaagcgtccaccaccagcaccgcgccttcacaggccgcaagtgagcgggaaacctcgtagttaaagtccacgtgacccggggtatcgataaggttgaacgtatatgcctcgccgtcgttcgcgcggtagacgagcgtcacagcatgcgccttgatggtgatgccgcgctcgcgctccagatccatgttgtcgaggatctggtcttccatgtcgcgcttcgcgaccgcctcggtctgctccaaaatgcggtcggcaagcgtgcttttgccgtggtcaatatgtgcaatgatgctgaaattgcgaattttactctgttccaagcgtgattctcctctttagaagtatacatagttaagtatagcattttcacggcgtttgcgcaatgactgcttttgaaaaagtccgcattttaaggtgcttcacaccttgcgcttttctgcctaaacgtggtatcatagaaaagacaaaaccacgcgtatacgtggttccataaggagaaccgatatgccgagattttttacatctgccgtgcagtttgacgaagccgcgtccgtaggctctgccgtcatagacggtgaagacggccgccacatcgcccgctccctgcgcatgcacacgggcgacgccctcacactttcggacggtgccggcaccgactacacaggcgaaattgaaagcatcacgggcgataccgtcatggtgcgccttaccgataagtttaaaaacagaagcgaacccaccctgcgcgtcacgctgtaccccggtatgccgaaggccgataaactggagctcatcacgcaaaaagccgtggagctcggcgtcacgaagattgtgcccgttttgacttcccgcagcgtttcccggccggatgcaaaatccgtttcaaaaaaacaagagcgtttgcagcgcatcgcgcttgaagccgcaaagcagagcggccgcggcatcatcccggaaatcggtaaaatgaccgatttagagtccgcgctcaaaaccgcacccggcaaaaagattttattctacgaaggcggaggcgaagcgctcggcacgctcgtctcccccgatgaggccgaagtttccgtcttcatcggcccggagggcggctttgacgctgccgaagtgcagctcgctaaacaatacggcgctgcacccgccacgctcggcccacgcattttaagaacagaaactgcaccgcttgcggcgctttccgttttaatgtacatcacggggaatatgcaatgaaaacagttttagtcaccggcgcgtcgggtgagatcggcgctgccatcgcaaaagaattcgccgccgcaggttacgccctcgcgctccacggcgcaaaacacattgaaaatgtaaatcaacttgccgaaactttcaaatcaaacggcatcgaagcctatcccgtctgcggcgacctttccgaccccgccgcatgcgagcgcgtgtgggcggacaccgaaaaaaaactcgggcatattgacgttctcgtcaacgccgccggcatctcgctcgtcgattttttcgacaccatgacgcccgcacagtggaaaactttgtgcgacacgaatctgtcctccgccgtttacctctctcaatgcgcgtcccgctccatgatccgccaaaaatccggcgctatcgtcaatgtctcgtccatttggggcgtgagcggcgcggcaatggaagtcgcatattccgccgccaaggccggtatgctcgggctcacccgcgcactggccttggagctcgccccgtcgaacatcaccgtcaatgccgtcgcacccggctatatcgataccaaaatgaacgcccatttgtccgaagacgagaaaaaagcgctgtgcgaggagattcccctcgggcgcgcaggcaccccagcagaggtcgccgcaggcgtcagatttttagccgaaagcccgtacatcaccggtgaaacgctcgtcatttcgggcggctggcgttaaggagaatatttaccatgtccaaacaaatcgatgcttattccttcgcactcggcgtgtgcgaggcattctgcgaggttgtccgtgccggcgtaaagcgcatcgcgctcagtcacccgttcacagaagacgaacttcaaaacgcactcggtgcagattttctccccgcgtgtgaagcagttgcccgaaagtacggctgcaaagcgtattatttaaaagaaccgctcatcaccgaccttttcccgatctcgttgaaccgcggcaagcaaaatgtcgttttctaccgcgaagaccgtgacctcgaagaattcttaagcatccaacacgataagcaaaccctcatcgccgaaaacacttatacggacgaaaaccgccgccaaatcgccgtgcgttacgggcatctgctctcgtacagcgacgaagccatcgcccgctatttagcgcaaaatacagaactcgagtaatcaaaggagcacccctatgtccatgaccattaacaaagagctgccgaacccggcggccctcaaagccgaatttcccgtcccggagcacatcaaagaaatcaaagccgcgcgcgataaagagattgccgccgtgttccgcggagagtccgataaatttctcgtcatcgtcggcccctgctcggcggataacgaagaaagcgtctgcgaatacacccgccgccttgcccgtgtgaacgagcaggtgaaagaccgtctcattctgattccacgcatatacaccaataagccccgtaccacgggcgagggctacaagggcatgctgcaccagccggatcccgataaagcccctgacctgctcggcggcatcatcgccatccgcaaaatgcacatgcgcgccattgaggagaccggcctcacatgcgcagacgaaatgctgtaccccgaaaaccgcagctatttggatgaccttctgtcctatgaagccatcggcgcgcgctcggtcgaaaaccagcagcaccgtctgactgcaagctccatggatatccccgccggcatgaaaaatcccacctccggcgatcttgccgtcatgatgaactccatcaaagccgcccaaagcgcgcacaacttcatctatcgcgggtgcgacgtcaccaccaccggcaacccgctcgcccacgctattttgcgcggcggcgttgataaatacggcacaactatcccgaactaccactacgaggatttaaaacgtctcgcttccctctacgaagaaagcgggctcgaaaatcccgcctgcgtcgtggatgtcaaccactcgaattccggcaaaaagttcaaagagcagatccgcatcgtcagcgaggtgctgcacagccgttcctacgaccccgccatacacaagctcgtcaagggcgtcatgattgaaagctacctcttcgagggcgcgcagaagatttgccctgagatgatccacggcaaatccatcacagacccctgcctcggctgggaagacaccgaaaagctgctttacagcatcgcggaaaaagcgtaaagggagttgtaagatgaaactgtacgtcacacgccacggcgaaacacccatgaacgctgcgcaccgcgtctgcggcctcacgaatatcgacctcaccgaaaaaggcatcgcgcaggcaaaagaagccgggcgcagcctccaagataaaggcatcaagcgcatcatcgcctccccgctcctgcgcgcccaacacaccgcaaggctcatcgcagacgagatcggcatagataccatcgagaccgaacagcggctcatcgagcaaaactacggcatctacgaaaataccgactgggacggcgaagcgttcaacgcaaataagcgcgagttcgccgtacgctaccccggcggcgaatccatgctggacttagccggtcggctctacccgcttttaaacaagctgaaagccgaaaacggccccaccacactcctcgtctgccacggcggcatctgccgcatgatccgcacctacttcttagatgtcaaaaacaccgactacgccgccttcaagcttccaaactgcggcatcatggagtttgatctataaaaaaagcatctcggctaagccgagatgctttttgcttacgcttccgtcgcagtgccatgctgcgggtcgtgctcgcgtttgatgcagcggtcaagccacttgcctcgcaaatagtaaataacgaagatcaccgccgtgatgacccatgataccgggtagttcatcgcgaccatctgcatcgtgtgccaatatggaaccataagcaatatccacacgacgcgcagaccgcatacgccgatgcaggtgatgagcatcggctgcaaagcctcgccggcaccgcgaatcgcgccggacaaaatctcgataaaaacaaacgtaaagtaagacggcgccaataccaaacagaactgcgcaccgatatttacaacctccgcatcgcccgtaaagaacatcaaaagctgatagcggaaaataaacagcagcgcagaaagcgcgatgatcgtgccaaggcacatgccaagccccacacgcgtgcagcgcttcatgcggtcatactggcgtgcgccgaagttctgcccggcaaatgtcgtcaccgcaatgccaaacgcgttcatcaccatccagataaagccgtcaatcttgccgatagccgcccaggccgcgatagccgtcgtgccaaagctgttgatactcgcctgaatgaggatattcgagaatgaatacatcacagactgcaagccggccggcaagccgatgcggaccacattctttagaatatccttgtgaaagcgaattttgcgcagctccacacggtatgcttcctgcgtgcccatcaggcggatcatcaaaagcacggcgctgatcagctgcgataaaaccgtcgcaaacgctacaccgaacacaccccagtgaaacaccaccacgaacaataaatcgagtaccacgtttgcaaggcagcacacaatcaaaacatacagcggcatgcggctgtcgccgatggcgcgcagaatacccgtgccgatattataaatcaggttgccgatgatgccgagataatacacgttcatgtacaaaaccgcgtcatccatgatgtcgtccggtacacccatcgcaagcattgtcgggcgcgccgtcacaatgccgatgaccataatgacaacgccgcccgccaccgccagcgccatggacgtgtggacagatttagaaagactttcgcggtcgtttgcgccgaaatattgcgaaatgatgaccgttgcgccggaagctacgccgacaaaaaagcctacaagcaggttgatgaccgtgcccgtcgtgcccacagccgccaacgcctcggtgccgacaaactgaccgacaatgatcgtgtcaaccgtgttatacaactgctgaaaaaaagtgccgatcaagatcggaaagaagaaaagcaaaagctgtttccaaataacaccttccgtgatcccgttttttattttttccaaacgttctccccctttgataccctataacgcctattcttaaaccgcgctctaaacacgcatacgcccattctaacaccttttctcccatttttcaagcggttacaaaaataaaagtacgaaataggattttaatttgacatcgtgggagatagccgcacccgtttcccggcgcgtatatttcaatcctaccgtacgcaaagcttttcgcgcgtggttcatcgaaaattccgccgccggaaagctgttcagtaaacggaacgacaaaggcagactttttagccactaaaaagcgcccgcagggtcaaaccttgcagacgctttcactttactcttctttactccacatacgtaacggggaatttcttctccttcacaggcgtttctgctgccgcataaccgatggccgcaatgccgaataccttgtggttctccggcacaccgaactccgtcaaaacggcgcgtacctcaggcacatcgcacgtgtcggaaagctggttgatccacaccgtaccaagccccatggaatgcgccgcgaggaagatattttcaagcgcgcaggcgttgtcccaggaagtgatacccgtgtcgccgatcagctcgttcgacggaatgataagcgcggcgggcttatacatgtcgtacttctcgttgccgagcgccttgcccacagccgccgtcagcttcgcgattttctcgcgatttaaaacagcagaaaaatgccatgtctggcggttcatcgcgctcggtgcatgcacagcgcactgcaaaagcgtgtcgatcttttctctctccaccgggcggtcgtcatacgcgcggacactgcagcgggtcaaaatgttctgaatcacttcattcgtcataaaaacgcttcctctctttgatttttcgggtatgtacccttatttttaagcggtcatccgcttattgattcaaaatttttccgccaaaagcgcggcgattttctctaaaaatgcctcatcttctgcggtaaagcgatcttcaaacgggctgtccacatccaaaacagcatagacttttccggctttcatcaccggcaccacaagctccgcacggctcgcgctgtcgcaggcaatatgccccgggaacgcgtgcacgtccgctacgcgcagcgttttcttctccgcaagcgctgtgccgcacacgccgcgccccgctttgatgcggatgcacgccggtttaccctgaaacggccctaaaagcaaattgccatccggctgcaccgtgtaaaagcccacccagttgatgtttttcagtgttagattcaacagtgccgaaaggttcgccatgttcggcacaagctccggctcgtcttcaatgagtgccttcgcctgcaaaacgacgtcttcatacgtcccgctgccttgaagctcaaaactcattttttatactccttgtaaacaaagcgttgacttcatcgtgtgcattttcgcctttatacaacacattgtatactgcgcggcaaatcggtaaatcggctgaaaccgtcttgccaaggcgcaaaagcgcgtccacggcgtaatagccctccgccaaatcggtgtacggctcgtttttcacaaacttctcgccgaacatgcggttgtgcgaatacggcgaaaacagcgtcgcttcgtagtcgccgaggtggcaaagcccgtaagccgaaagctcgttgccgcctaaagcgtcaattagccgcgcaatctcacgcgtgccgcgcgccatcaaagcgccttttaacgtcgaaagcccgaggccgtccagcataccggcagcaatgccgacgacattcttcgccgccgcaccgatctcattgccgataaggtcctgtccgtagtaaaagcgaatgaggtcgctgccgaatgattccaccagcgtcttttttgcgtcttcgctgtcgctgtcaatgaccatgcagttcggcacaccggccgcaaactcctgtacatggccgggaccaacccaaacagcgaccgcgttcgagttgtcacactccgcggcacacacctgggaaagccgcatgccggtttcaatctccacgcctttcatgcacagcacgaaaattttatttttcagctcaaacggctgaagctcgcgcatcaggccgcgcaggccctgcgagttgacggagattacaatcacgtcgctgtctttcacaacgtccaaagaatttgtcagatgtaaagtttcgggcagctctacaagcccgttcgtacgggtttcgatgagcttttgcatgtgggcagagcttttccgcccgtaaagagaaacactgtggccgattttatcgaggtaccacgcgataaacgtgccccaacggccgcagccgataacggtaattttcatagggaatgctaaggtccttccaaaggggtaatgtaagcgcgaaattcaaatcacagctctgtaaataaatcttttgcgtctttggcgtaaatgatgccggaaacgacggcgagcaaggttgcaatcgccatcacgacaaaattcacccatgtaaatatcggagaaagcgtctccgtcggcaaagccaaaatgccgtatgcgccaaggtcgagaatgtactgcgtcaacagcacgatgcagattgcgacaatctgcgatacggttttcgccttgccccagttgttcgccgggatcaccctgccctgctccaccgcaataaggcggatggacgtcacggcaaattcgcggaccataataaggagcacaaataccgtgttcgtcatgccgttcgccacaaagcagacaagcgccgacatcaccatgatcttatcggccaaggggtccatcagcttgccgaaatttgtgatgaggtgatcgcgccgcgcgattttgccgtccaagtggtcggtgtacgacgcaatgccgaaaattgccagcgccactaaattgtggtgtgggaatatgtcgccggaaagcagcatgaaaagcacaaaaaacggtactaagatgatgcgcagtatcgtcagtttattcggtaaattcatagcggttctcccgtttagacgcgcgtaccgaacaggtcgccgtcaatggcctcgtccacgtgcaccgttaccatttcaccgtagtacggcttcgtttccgcagagaaaaacaccttgccgtcaatgtccggcgcgtccatggcgctgcggccgaaccagcattcggcgtagcggtcaaagccctccgtcaacacggtgatgtcccccccaacctgcttttcgccaaggcggtccataatgttcatctgtgattccatgatgatctccgcgcggtgattcttcacctcgtcgtcgatctggtcgggcaacaaagccgccggcgtgccctcctcctgcgagtaggcaaagcagccgaggcgctcaaattcaatatctttcacaaattccgcaagctcggtgaattcctcctccgtctcgcccgggaaacccgtaataagcgttgtgcgcagcgtcacgcccggaatcttctcgcggatcttcttcatcagcgccgtcaggctctcacggtcgccggtacggttcatgcgctttaaaacgcgtgcggaagcgtgctgcagcggcagatcgatatacttgacaatcttctcttcctccgccatcgtctccaaaagctcatccgtcaaagcgtccgggtaacaatagagcacgcgcagccacttgaggccgtcaattttgcacaggcggcgcatcagctttgcaagggaatattcgccgtacaggtcaatgccgtagcgggtcgtatcctgcgcaatgaggatgagctccttcgcgccgttttcaacgagaccgcgcgcttcttcctcaatgctctccatcgtgcggctgcggtagccgccgcggatcatcggaatcgcgcagtaagtacatttgttgtcgcagccctctgcaatcttgatatacgcaaaatagctcggggtcgaaagctcgcgctcgccgcacagcggcattttgctcttttcgggaaagctctccgtaaaatcattcattgcactttcaatgcacgccgcaatgtccgcgttcgcgccgatgccgaacacaccgtccacctcgggcagctctttgtgaatttcctcgcggtagcgctccgcaagacatcccgtcaccacaatcttcttgatgcggccctcttttttcagtgtcgcaagctccagaatttcatcgatggattcctgcttcgcgctgtcgataaagccgcaggtattcacgattgcaacgtctgcaagcgcagcgtcatcgcacagctcaaagcccgcgtttttcaggctcgccatcagcatttcgccgtccacctggtttttggcacagccaaggctgaccattcccactttaattgccatgtatataaccctttctcggtgcatatccaagctttagacatgcccttatataatttctgttctgccgctacctattttagcagaaaacaagcggcttttcaatcgaaatgccgcccgttcacaaaaatcatacaattatacgcgcaaaaacacgcttgccgcccggaaatcatgcttttttgtgtagcacagccaccacgcacggcactttgcccgggcaccagatgtattccgcatccgtatagtccgcgtccttaaagaactgctcataggagctcagtgtaaattcccgcttaaaatccgcacccgctccgcacaatattctgtgcgtcctgcggttgatgacattcgtaagtatatcatgcaccccggcatcccgatttcaaaacataaaagctctcctgttgattttaaaccgtgatctgtacaaaatacactcgtttttcctgcgtcgataccagtatatacaacctgctgccgtcctctttttccagaattttgccgcttaaattttcttcaaacggcggcatgctttcttccggcacaccgatctgcttcaaagtcgtttcaagctcatcctgcggaaattcaacattttcctgcacaaaagtcggaaacgtgtccgctttttccgcctcaaaagccgtgtaccgcacaccgtcgccgagcgccatatctttggaatgtgccgaataaacctccgtcatgccctgcggtagcttgattttccataattccgcgtatcgttcggcgttcgtctgcataaagcccaatttcagtcccacgccgagcgaaacaccgaaaaccaacacgcagagaattccgatgcaaaccgactttttcacagcttcacccccggaacacaaaacggccctgcaaccaaagcagcgccgttttacggtcattcttctgaatttaagacagagaagatctcgtcaaagccgtagccgtagcgctgcaaggcggctacggcacggcggcgcactttttcgtcttcgcgcgccatgggatactttcgctccaaaatggcgcggatgttttcctctgtttccgaacgttctgtggaaaactcgtccatcaccgcggcgatgagcgcgtcgtcaatgcccttttggcgcagctcctgctttacgcggcgcgcgccgaattttttgcgtgtgaaaagctcgtttgcaaggcggcgggcgtagtcctcgtcatttagtaagcccagctcttccatgtgctccacggcgctgcgggcagcctcgcggtcaaattccgcgcgggtgatcttattttccagctcttttttggagtgggcgcggtgctccaaaaggtacagcgccttttcctcggcgcggtgctttgcggaggcctgcaaaagttcgtgcagctcctcatcgtcgagctcgtcgccgatggcaatgccgcggcgcaaaagcgtttccgtgtccaccttcaccgccgcttcgccgtcaatataaagctgtgaaagcctgtggcggcgcggggcgatgtccgtgatcttcattattcgtcgtcatcgaccgtgatgtcgatgtctgcctgcacgttcttacgggtgttctccgcctgctcgggggattcttcctcctcggccttttcaacgggcttcggcgcactgccgcccttgatggactttgcgtagagcttatccgcgttctgacggacgagctcggaaatttcctcaaaaatatccgggttgtcgcgcaggaagttcttcgcattgtcgcggccctgaccgatacgcgtaccgttatacgagaaccacgcgccgctcttctgcacgatctcgagcctttcggcaaggtcaagcaggtcgccgaccttcgagatgccctgcccgtacatgatgtcgaattcaacctcacggaacggcggcgcaaccttgtttttcacaaccttgacctttgtgcgggagccgatgatgtcggtaccgctcttcaaaacctccttcttgcgcacatcgagacgcacggaggagtagaatttcagcgcgcggccgcccggtgtgacctccgggttgccgtagacaacgccgactttttcgcgcagctggttgatgaaaatggcgacgcagtttgacttcgagatggcaccggcaagctttcttaacgcctgcgacatcaaacgcgcctgcaagccgacatggctgtcgcccatttcgccctcgatctccgcgcgcggaacgagcgccgccacggagtccacaacgataacatcgatggcgttggagcgcacgagcgcctcggtgatctcgagcgcctgttcgccggtatccggctgcgaaacgagcagagaatccacgtctacgccgagcgcggacgcatagaccgggtcaagcgcgtgctccacgtcgataaacgccgcgttgccgcccattttctggccttcggcgacgcagtggagcgccaaggtggtcttaccggaggattccggcccgtagatctcaatgattctgccgcgcggcagaccgccgataccgagcgcgaggtccagcgaaagagagccggtggagatcgcatccacgtgcatgccgttgttctggccaaggcgcataacagcgccctcgccgaactgctttttaatctgcgtcaacgcagtctcaagcgctttgcgcttgtcttcgggcttgatgtcctccacttttttacttacggggcttttattttccttcgccatggttatatcctcacttcttttgaaatttgggttatggttcctgatggattgtgtttccgtcgagcgtggttaaagttttcgccaacctttttcaaaaggctgcggtttccaaaggtgaaactcttttttactgcctctattatactaaatccgtcgaaaaaaagcaacggttttctcgaacatattttcttttcttgctgaggtgagcgaaaaagcgacagtcaagaggacatcacaggacatctttttgcgcaaaaagggcagaaccccggaggaaaccggaactctgcccttttttagcttatgtagaaattacagaccgagcagttcggttgccgctttctccatttttgcgatgatctcatcggactctgcggcggttttacccttgccggagaggtaaattttgatcttcggctctgtgccggacgggcggacgatgagcttgctgccgttctccagacgatactcgagcacgttggacttcggaagcgtgatctccgtcttctccgcgccctctgtgcgcacggaaagctgatagtcgctgtcgccgacgaccttgaagccggcaatctctgccggagcgttgtggcgcagatgatccatgatggaattcatcttcttcatgccgtcttcgccctcaaacgcgaagttgcacagggcattcttgtagtagccatacttttcgtacagaacattgatggcatcgacgagcgtcatgcccttttccttgtagtaggaagccatttcgcagatgatcatgctgccgtccacggcgtccttatcgcgcacatagccgccggagaggtagccgtagctctcttcaaagccgagcagatagcgctccgggtggccttcgctctcaagcaaagcgatctggtcgccgatatacttgaagccggtgagggtacggcgaatttcaatgccgtaatccttcgcgatgccgttgaccatatcggtggaaacaatcgtcgtgaccgcgaccgggtccttcggcatggtgccgagctccgttttgcactgtgcaataaagttcaggagcagaatgcccacttcgttgccggtcatgagcacatattcgccgtgctggttgacagcgatgcctacgcggtcacagtccggatcggtcgcaagcagcaggtcgggctttacggtcttgcagagatcaaggcccttctggagtgcttcgcggatttccggattcgggtacgggcaggtggggaagttgccgtccggctcgctctgctccggcacaacggtgatatccttcacgccgatgcggtcgaggatgcgcagcacgcacattttgccgctaccgttgagcggggtgtagacgagcttgaggttatccgccggcttaccgaggatgctcacgccgtaaaccgcgtcgatgaacgcgttgacggtctcttcgccaatatattccgccttgccggaagcgagcgcctcctcaaacgggattttcttcacgtccgcgaaaatatcgagcgcttcgatctccgccataatgccgtctgccatgccttccgttacctgacagccgtcgtttccgtaggccttatagccgttgtactttgccgggttgtggcttgcggtaacgcagatgcctgcatcacagtgcaggtgacgcacagcgaaggacagcgccggggtcggcatgagctgcgggtagaggtacgccttgatgccgtttgcggcgagcaccgctgcggactctttggagaacagcacgcccttgttgcggctgtcgtgtgcaatggcaacggaaaggggtttaccctccgtgttgtgcttattcaggtagtttgcaaggccctgtgtcgccttgcgcaccgtgtagacgttcatgcgattcgtgcctgcgccaatgacaccgcgaaggccgccggtgccgaaggcaaggtctctgtaaaaacggtcgtttatctcctcaggctgatccttaacggaaagcagctcttctttcaagtctggatcgtccagttcgacgctaagccatctttcatactcggtcatactctattcttccttccatggtttaaattttcggcagtgtgaaaaaacgtatctgccttatgttaaatgcggatgacccgcacctacacgctataattagattaccattttatctgtgcaatgtcaatgacaagttgcgtcgctccatgtcaatttatgtgtaaaatatttgttagtatcccggcgggcgaaatatcaaccagtccgcaggtcgcgcgaaagcccgagcaggagccgggatttaagatatacagtccgtcgtcgtaggtctcgagcgcctcgtgcgtgtggccgaacagcaaaagattcgcacccgcctcccttgcggcgcacacaacggtatagagccctgatttcacatggtaaaggtgcccgtgtgtgcagaaaattttagcgccgtcaaggtctaaaatttcgcgtaccggcacgtctgcgcagccgaggtcacagttgccgcgcacagagtaaaatgcgatattcgggaacagggcgcgcatcatttgaaaatcgttttgcccgtcgccgagaaaaatgacggcatccacgtctctgtgcttctcgagcgtttcgcgcatatagagcggcatgccgtgggaatccgaaaaaaccagcagtttcatgaaaattctccttcttttgaatttaacgcagatgaggtctcattttttcgcgccgcgcataaactgtaaacggaagtttccctaaagggagggtttaccatgaacgaacgtgaaatgcaatcgcttttggctttggcggcgaaacggctgcacaccacgccggaagcgctgcgcgccgccgccgaaaatggcgacctgcagaacattacgggcggtcaaaataacgcggcggcttcgcagctaaaccgcgttttaagcgacccggaggccgcgaaaaagctgctttccacacccgccgcgcagaaactatttgaggctctcggcggcaaaaaatagaaaggaggtgagcggcggtggaagatctggccgcagccgtacaatccattttaaacgacccgcaaagcatggcgcagctgcagggcgtgatgaactcgcttggcatgaatccgccgcaagcccctgccccggctacgccgcccgtacagcaaaaaccggcggccgccgcgccgctcaatttgctgaacactctaaacaacagcgatccgatgacggcaatgcttttgcgcgccgcgccgcttttggcaagcgcgaaccgcgaagatgactccacgcgattgcttgcggcgctgcgccctttgctcggcgaagcacggcagaaaaagctggatgaagcctcgaaaattttgaagctcttgcaccttttgccgcttttgaaagagagcggcgttttacagaatattctttgagaaaggcggggtaaaatgccgagtaacatgccggacgcacgcgccgtggaagaagccttgcgccgcgcgcgggaaatgcaggggcgctcggcgcataacgcgccgcccccgccggaaaagccaacggagaaatcaccgcagggaaatgcggaaacgtcaactgaaataccgaaggaatttcaggctgctccgaatagacctctttctcctctcgatacgctgctaaaagacaaggagcgcacgcttttgcttgcactcctccttttgctttacaacgaaggcggcagtgcggagcttttgttcgcgctcttttatctgcttatctgatctgaccgtcgccgcggatgatgaatttgtaggaaacgagctcatttaagcccatggggcctctggcgtgcagtttctgcgtggagatgccgatctccgcgccgagcccgagctcgccgccatccgtgaagcgcgtggacgcatttacatagaccgccgccgcatcgacctgtgccgtgaaccgctccgccgcacggaggttttcggtgacgatgcactcgctgtggccggtagaatactgcgcaatgtgcgcgatagccgcgtcaaggctgtctacgacgcgcacggctaagatataatcgaggtattctgttgcccagtccgcttcggtcgcggggttggcttcgggcagaagttcgcatgtgcgcttatcgccgcgcagctctacgtttttctctttgagcttatttgagatgacgggcagcgccgcttcggcaatgtccttgtgcaccaagatcgtttcgatggcgttgcagacggacggacgggaggttttcgcgttgaaaatgatattcgccgccatttcgatgtctgcgtctttgtcgacatacacgtggcagttgccgacgccggtctcgatgaccggtaccttggcgttttccaccacggcgcggataagccctgcgccgccgcgcggaatgagcaaatcgaggtactccgtcatgcccatgagctccacgctggacgcgcgggaggtatcctgtacaagctgaacgctgtcgcgcgggaggccggcggattctatcgcatcgcgcagaacctcggcaatggcattattggagcggaacgcttccttgccgccgcgcaaaatgacggcactgcccgccataaggcacagcgcagccgcgtcgctcgtcacgttcggacgagcttcgtaaatgatgccgataacacccatcggcaccgtgattttttccactttaagccctttggggttcgtttcgccgcttaaaatgcggcccacggggtcgcgttggacggatacgtcttccacgccctttgccatgccctcgatgcgggcaggcgtgagcgccaagcggtcaagcatggcttcgctcatgccgttttcttttgcggctttaaggtcttcttcgttcgcggcaagaatttccgcctgacgcgcgcgcagggcagccgcggcggcgtttaatgccgtgcgctttttttcgcccgcggtgcgcagaacggcggcggctttttgggctgcggcacccattttttgaagttctgtcatacgcgttgtgttcctttctgtaagttacggcatgaacaccgtgccgatgtcctcaccgtcgaaaatgcgatagaggttctccggatcttcgccggagaggatatatgtcgggatatttgcacgccctgcaatctctgcggcgcgaattttcgtcgccatgccgcctgtaccgcgtgcggagcctgccccgcccgccatggcacgcacctcgtcgtcgatcttctcgatgacgctgagacgctttgcgtcggggtagaccttcgggtttttgtcgtatacgccgtcgatgtccgttaaaatcatcagcacgtctgcgttgatgatgccggcgacgatggcggaaagcgtatcgttatcgccgaagttgcgaccctcgagctcatcgaccgcaacggtatcgttttcgttgacgatcggaatgacgttcatatcgagcagctcacggaatgtattttccacgttgcggcggctgatgggctgcgaggtgacatctgccgtgagcaagacctgcgcgacgttctgatgatattcgccgaagaatttatcgtaggcaaacatcagctcgcactggccgatggcggcaagcgcctgctttttggcggtgtcgtccgggcgctccggcaatccgagcttgcccatgcccacgccaatggcgccggacgtaacgagcacgatgcgacggccgccgttttgtaggtcgcacagcgtgcggcagagcttatcgatgcggcgcaggttcattttgccgttttcgtatgtcaaggttgaggtgccgattttcaccacaacggtttttactgtatttaaatccatgattttatttgttttcaccgcaaattcgcggcaaaaacgtcctttccccattctcttttctgctccattatacatggaaacaacgcaaaaagaaagcctttttgcaaaaactcaggcgttaaaaacgtctaagtcttcgccgtttacgaccttgcccgtgtagcccgcatcgcggatctcctgcaaaatgaggtcgctgcggcggcgcgtttcggcttcgacatcaatggcgttatcctgagtattcatgtggtaaatgcggtggtaggtgacgagcagcttcggctgcgcttttttcgcaacctcagctaagtccgtgctgagcgtatgcacctcgcggtgatatttctgccacttcggttcgcgcgcggcaatgccggcggcatactcgacctcgtgcagcagaatatcgcagtttttggccttttccgcgacgatgtcgagcggggcggtatcgccgctgatgacaacggtctttccgtcttttgttgtgaatttatagccgtagctttcgagtgtgccgtggctgacggtgaacgcctccacggtaacacgttcgtcttcgtaaataacgcccggttcaatctccgtcgcttccaccttatagccgttttcgtttgcgcgctcaaagccgtgcaggcgaaaatcgatatcgaccgcataggcagagagcagatgctgcgccatatttcggattcccttcgggccaaagacccccagcggtttttcccgttccagcacccacggggtgaaaatgagatccgcaaacccggcggtatggtcggtatgcaaatgcgtacagaacgcggtatcgagcagatcgggtctaagggcatcttcgccgcggcggtacgcttccgctgcgcgtcttacgacgccggggccaaaatcgacgaggtacgcatggccgtcgacaacgacggcggaagccgggccgctcgcccacgggcaggcgttcggtgtgcccgtaccgagtaaaacaagtttcgtttccacgtttatcatgcctttctggtttagaaaacaaaaagggacaagcctcggcttgtcccccgttatcgaacttagtgtctgtcgtttctgtcgcggcgcggacgatctccacgcgggcggtcgctgcgctcacggcgcggctgcttctccggcaagacgttctccggcacggcaccgtcaaggtcgatcagcgcttcgcggcgggagaggttcagtctgcccttatcgtcgatttcaagcaccttgaccttcacgatatcaccgacattgacgacatccgtgacgttctccgtgcgcttgatgtcgagctgagagatatgcacaaggccttccttgcccggggcaatctccacaaacgcgccgaagtccatgattctcgtcacgcggccgctgtaataggagcccggctccgggtcgttgacgatggtatcgatgatgtccatagcgcggcggcacttttcaatgtctatgcccgcaacatagcagtggccgtcatcctcgatatcgatggtaacgtcgcactcggcgcagatcttctgaatgaccttgccgccggagccgatgacctcgcggatcttatcgaccggcacgatggtggacagcatcttcggtgcatatttggaaagctcgggacgcggctctgcgataaccggcagcataacttcgtccagaatgtaatttcttgctttgtgcgtctttgcaaacgcttccttgatgatctccggcgtgaggccgtgaatcttcaggtccatctgaatggcggtgatgcccttctttgtaccggcaaccttaaagtccatatcgccgaagaaatcctcaagaccctgaatatcgaccatggtcatccagcggctgccctcggtgatgaggccgcaggaaataccggcgaccggcgccttaatcggcacgcctgcgtccatcaacgccagcgtagagccgcagatggagccctgagacgtggaaccgttagaggaaagcacctcggaaaccagacggatggtatacgggaactcctcaaccggcgggatgaccggcacaagtgcacgctctgccagtgcgccgtgaccgacttcacgtctgcccgggcctctggagggcttcgtctcgcctacggaataggacgggaagttgtagtggtggatgtagcgcttggactcttcgtcgtcgatgccgtcgagaagctggttgtcacgcgtagagccgagcgttgcaacggtaagcacctgcgtctggccgcgggtgaacataccggagccgtgtacgcgcggcagcagaccgacttctgcggcaagcggacggatctcatccatacctctgccgtcaacacgcttctgctcgtcgagcagccagcggcgcacgacgaacttctgcgtcaaatacatgcactcgtcgatctttgccgcctgatcggggtaaatttcgtcgaagtgctcgtgcactttttcgtaaacaggcttgagtctctcatcacgaacggtcttgtcgtccgtatcgagtgcggccttcacgtcatcaatggcaaaatcgcggatttcttcgaacatctccggatccggcttattggacgggtaagagaacttctctttgccgatctccctctggatacccttgatgaactcaatgattttctggttttccgcatggcctgccataatgccgttgaacatatcctcgtcggacacttcgtttgcaccggcttcgatcattgcaatgcgctcatcggtggaagcgacggtaacagccatctgggagagctttctctgctctgccgtcgggttgatgatgaactcgccgtcgatgaggccgacggaaacaccgctgatggggccgtcccacggaatgtcggagatggacagcgcgacgctggtgccgacgagtgcggcaatctccggggagcaatccgggtcaacggacatgacggtgcagacgatggaaacatcgttgcgcatgtccttcgggaacagcgggcggatggggcggtcgatcatacggcagacaagaatcgccttatcggtcgggcgaccctcacgctttaagaaagagcccgggatcttgccgacggagtagagtttttcctcgaagtcaacggaaagcgggaaaaagtcgatgccgtcacgcggctttgcggcagcggtggctgccacgtggatggtggtctcaccgtaacggacaaggcactcgccgtttgcaagctgtgccattttaccggtttcgatcttcagcgggcgtccggcaaattccgtttcaaatactctgaaattttcaaacataaaggttattttccttccccccgaaagccgggattttccgactccgcagaccgtttaacaattaaaccgacgcacacgtgttttacgacctgtatgcgcccgtttcactgctaaacagcccttggaatcattttgtgcagatattaaatcagctgcgcgggtcgcgcgcagctgaaaaaagacaaaaaattacttacggataccgagttctgcaatgattgctctgtaacgctcgatgtcaaccttaatgaggtagttgagaaggcttcttctctggccgaccatcttcagcaggccgcggcgggagtgatgatccttctggttggtacggaggtgctcggtgaggtcgttgattctcttggtgagaacggcgatctgaacttccggagaacccgtgtcgccctcatggcgtgcatacttcttgatgatctctgtcttttcgctcttcagcattgtgttttccaccttttctaaaatatttgccgcgctcacaggtctgggtcggtgttatccctgcggagatgtctcccaaaagggttagtccctgatccgaggacgggtactttgaaagtatagcataattcttcaaagtttgcaagcggtttttcctctgcggcgcagatttttcgttccgtacaaaatgacgaaaacgtccggcccaaagccgactttttcacggctcttcctgccttttttgcgaaactcggacattttcgacatggtgcatcttgacaagcttttgaaatccgtatactattaaacagttaattatcgaaacgaccgtgcaaaagcaagtttacccgtgaaagactgaacacaaacgacgcgaaaaggcgttatgggcgcggaggtttttccgccggagaaaggatatttttaatgagcaaaattgcagttgttaccgatacaaacagcggcatcacccgcgaggaagcgaaaaagctgggtgtttatcttctgcccatgccgttcatcgtagacggcacggagtattttgagggcgtcacctgcacgtatgagcacttctttgagatgctggaagccggcgcagaggtctccacctctcagccctcgccggaatccctcacggcaatgtgggaggaggcgctcgcgacgcacgattccgttgtgcacattccgatgtcttcggcactgagcggctcttgcgacactgcaaaggcactcgccgcggaatataacggccgcgtatgcgttgtggacaacaagcgcatttccatcacgcagcgcgaatccgttctggacgcgctgacgctggccgaaaagggtctgaccgctgccgaaatctgcgtgcagcttgaaaacaccgcgtataacgcgagcatttaccttgctgtgaatacactggagctcttaaaaaagagcggccgtgtgacgccggccggggcggcgctcgcgacgctgctgggcctcaagcccgttttgcagattcagggcggcaagttggacgcttacgcgaaggtgcgcggcatggcaaacgccgaaaaaacgatgcttaaggcgctcgaaaaagacctgcaaacgcgttttgcgggcaaaaaggtgcacattgcggcggcgtactccggcgatatcaagcccgcgctcgagtggcgcaagacaatacgcaagtattttgatgacaacagcattgagctttacaagctccccatcagcatttgctgccacgtcagctccggcgtaaaagcgctcggctgctttgaatattttgagtgatttttgcgtttacatacaaaaccctcgctgtgttcgtttgaagcacagcgagggttttcttatttatgttcaagcatttcaatgcttgcggcacggttatggaggctgccaagcaagcctttgaggcttaaaatgcggaaaagcagctgttcgcgctcggtgagcggcgtttgaaacgcggctttgacatcttcggtcgttttgccgcagtaccgctcgaacgcttccggcgtgatacccagcatttcgacgagggcgtcgatgtcgtcaacaacggtttttacatcggcgtttttaccgctctgcgccaaagagaggtactccacgagccaatcgaaatatatggttccctttatgctgcccgacgcggcttccaaaagcgcatcgagcgtttcggcatcgcaatgcgcgatggttttgaatgtttcaaacccgagtcctgttttttcgcggcaggttttttcccattctttcatgtcgattggggtgagcatgtgcaggggcctccttttcaaacgcttcaaacagcgttcttgcggttttttcgttcaggctgatctccgctttcagcgcgtctaaatcgggaaactttttttcgtccctgacaaagctcaaaagctccagacgcagtgttctgccgtacaggtcgccgcctgtgaaatcgggcatccaggtttcggaaagcgcgtggtcggagccgacggtgggctttacgccgacattcgtcacgccgcagtaggttttgccgtccacatacacggcggaggcgtacacgccgaagcgcggcagcacgaagcgcggcgggaaattctggttaatggtcggcgtgccgatggtatgaccgatgtggttgccgtgcacgacctcaaagcagaagccgaacggtctgcccagcatggcggtgacatcttccatctcgccgttttcaatcgctttacggatgcgcgtggcgctgacccgctcgcctttatattccactgtgggcacgacgtgcatttcgccgccgtgggcttcgcagagctttttcagccactccgtgtcgcccgccgcgaacttaccgaagcggaaatccgcgccacaggcgatgcgcttcgcgttcaaaccgaagcgcagaaggtttgcaaagcgctccgcgggccactctgcaacctgtgcaaaatccggcatgatgacatactccacgccccagctttccaaaatgcgcatgcgctcctcaacggtggtgagatagcagcaggtgcctgtaaggtactccgcagggttatcccgaaacgtgaaaacaacgggtgtgagtccgctttccaccaccgtgcgaatgaccttataatgcccgatatgcaggccgtcaaacgcgccgagcgcgaccgccgtttttttctcgccaatgaactttcgtatttcttccgtattgcgaatgacgtgcatgtgccgattccctctcatttttctgaaaatgacttaacgtatttgaattctccgttttccgcgcgggcgagtcccaagaacttctcgccgtcttcgtacagcgcgacctgcgtgccctccggcatggcgatcttcggtgcacggcagcgcgaaattgtgagtgcaccaccgtttaaatatctttgtgcctgcgccggtgtgacagacacggcagtgagcatcgaaaagagcttttccacggggcgaagaatttcatcaaagctttccccgttttctttcatcgtctttaatgtatcaagcgagacggcgtctgcgagcgtaaagccgcacgctgctgttcttctgagcgccgtcatggcaccgaccgtgccgcatttttgggcaatgtcttcgatcagcgtgcggatatacgtgcctttcgagcacgtgacgtgcagcttgccggttttttcattctcgttatattcgagcagcgtgagctccgcaatatgtacgggccgcgcttcgcgctctacttcgatgccctgccgcgcgagcttatataatctctgtccgttgacggagacagcggaatacataggcggcacctgtaaaatatcgccgcgaaaagaatccagtgcagtttcgagcgcagctcttaaaacgggggtttcatccgttttgatgacttcgccggtcacgtcgccggtggtatacgcttcgccaaaccgaaaagaagcttcgtaggtctttgcggtttccggcagaagcgacacggcttttgtggcgcggccgagcaaaagcggcagaacgcctgttgccatggggtctaatgtgcccgtgtggccgatgcgcctttcgcgcgtcaacccgcgcacgaccgccacggcgtcaaacgacgtgaagtcctgcggtttatccaaaacgatgatgccttccatgctgcctccgtattaccagcccgcctcttccacgaatttgtagaagtccttttccgcgtctttgtcttctgcgcggatggtgccgacggtctcggtataaatgatgtattcctcttcgccgtccaaatcaaacagcgtatcgcacaaattctggtcgtatgcgccgatgccgcaggtgccgagattcaaagcactgcacgcaagatacaggttttcgcccacgtggcccatatcaacaagggaacctctgtggctgaaaatgccgtagcgccactctgtgcggtacggaacgaacgaccaatagaacacaacgctcgactttttcacccagtgctgatcgcacagggacttgtcgatgacgtcttcgatgttttccacctcaccgagatactcgagctgattttcgagcggcagatagtggtatttgccgggctttaagccctctacacggcgcacgagcaggtatgtttcaaacggatgtctcgcgccgccgcacggcacggtacgcagcgttgcatactttttgccgcggataccctttacgccctgcgttgcccaaagtaaaaacgaaagctccaaaagggacaggttctcttccgtataaacgcgggaagagcagcggttgaaaatgacgtttaagaggtctttttcgaggccaagcggcttaaaatcgcgcggcagatcgatacgcgcatcgctcaccggcgctttcgtcagcggcggctgcggcagcattttctgctggtcggtcttgtagccctccggctcgtcgcttgcatcttgctttaaaaagccacgtcggctttctgtgatggcgcgaatttcttcgggtgttaattctttcatgtgaactcctcccatctgatttacagctgaattaaattgccgattttcacttattttcaagcgctttgatggcttcgccgcaggcggctaccacgcgcgcttttacgtcttcaagctcgcccgtaagggagcagcctgccgcacctttgtgcccaccgccgccgaatttggcgcagacgacggacgcgtccgcggggttcgtggcacgcatggagaccttccaaacgcccccttcgcgctcgcgcagcgtaaagcccagcagaactccctccacctggcgcaccatggcggaaacgccgtcgagatcgtcttcggaagcgccggtttctgcgatgacttcattcgtcaggcaaaataccgcgcatttaccgtcacagtggaactccatgttgccgtacaggcgtttcagcagcgctacggcagcgcggcttttggtatcaaacatcaggcggttgatctccgcggcgttcgcgccgtgctccaaaaggtccgccgcgatgcggtacgtgtttgcggaagcgttcgggtagcggaagcagcccgtatcggtggaaatgcccgtataaaggcagtccgcgatcttcggcgtgatctccgcgccaagcgccggaatcaaacgcgcgatgagctcgcacgccgcgcctgcggtgccttctacccacgtttctttggcaaacggacggcaggacgcgtggtggtcgatggcaaaatccgttttgtcgccgtagggctccaaagagccgagcagcgttttatcggccacatcaaccgtcacgatatgctccggctcgaactcgccgtattcgatgccctcaaaaagatatgtgaatttcggcggcacggggtctgcacagcggaacatgaccgatttgccgagcgcgatgagtgcgcggctgagcgccgaagcgcagccgagcgtatcgccgtccggcgagcggtggctgaggatcaaaattttgtctgcgccgcgcaggaaatgtgcggcatcctccagatttgccataagcgtgaccaagctttcgggcgaaaattacacccaaaagcactcctttctttgaatctttacggaaagcttattttttctcgttttcaaggtcgtgcagaatgcgcgaaatgttggcgctgtactcaatggaatccgtcgccttaaagatcatttccggcacatggcgcagctttaagcggtttccgagctcgcggcgtacatagcccgcggcgcttttaaggcccttaacggcattttccgccgtctccatgccctccatggcgctgacatacactgtgcagtaggaaaggtcgtttgtgacctccacacgcaccacactcagcatgcagccgctgacgcgcggatccttgagttctcttaaaatagcggaaacctcacggcggatatcctccgtggttctgcccaatttataactcggcatcgtttattctcctttctcttccggcagaaagcgcgcggaaatgagctccgctgcaactttaaagcccgccttcagactttctgtttcgatccactcgccgcgtgtgtgctcaccggcgccgacgcaaagaccgattgccgcggcaggaatgccgtttgcaaacgggatgttgcagtctgtggagccggcatacacgcccgggcgcgtgccgaaatggttttccaccgcgtccgcgcactgtgttaaaagtgcgcggacgcgggtcgtgattttctttgttgccgcagggacgctcgccgagcagctctgccgtgacgtctacgccctctgctttaaattcttccagtattttctcaaaatatgccttggcatccataaggcacgcgtaatcgtccgagcgcatttcgtacagcatttccgcctgtgccgcgatgctgttgacggtcgtgccgcccgagatcgtaccgacgttgaatgtcgttttcgcgctgcctgcgggaattttgtattgatagagctccgtgatgatggcagaaaggcgctcaatggcgtttacgtttccgaaatcgacaaacgagtgaccgcccgtggtcttcactgtgaccttgtagcgcagagagccgaccgccatgccgacgatgccgtcaaggtagccgtcaaatgaaatgacctgctctatgcgcttgccgtaccgtgcgtttaaagcgcggctgccttttaagttaccgagaccctcctcgcacgagttcatgacaaatacaatgccgccgttcgttttcggcttttcgtttgcgacataagccgccacaagcataagcaaagcgacgttcgcggtgtcgtcacccacagcggggcagaaccacttgccgtccttttcggtcagttcaaggggcacagactccgggaaaaccgtgtcgatatgcgccataaaaattgcgacaggcacatcgttttcggcgttatattcgtaaatgacgtttttcgcttcatcgataaaagcgttttccgcgccgtggtccataagccacgctttgcagaatgcagcacgcttttcttcgtggtggctcggcgacgggatcaagcacagcgtgcgcagcagctccagcgccgtttggtgattcgcgagaacgtattcgttcaaattcatagggaatgcctttctaaagcaaagccgcgtcccgcgatggggacgcggctgaaccgacttttagtctctgtactcttccatttcgtaggcttcgaggatgtcgcccagcttgatgtcgctgaagcgctccagcgtgatgccgcagtcgtagccgtcctgcacttccttcacgtcgtccttgaagcggcgcagggaagcaatcttatcatcggcaacgataatgccgtcacgcacaaggcgcacctgcgcgccgcgcacgatcttaccggaggtgacgtgaccgccgatgaccatgccgacgttcgtgatcttgtagacctcgcggcactctgccttgccgaggaacacttcgcggtacttcggtgcgagcatgcccttcatagcggattcgatctcttcaatgcagtcataaatgatacggtagaggcgcatatcgacaccgtcgcgctttgcgttctcttccgcgaccgggtccgggcggacattgaagccgacgatgatggcgttcgaggcgtttgccaacatgacgtcgctttcgctgattgcaccgaccgcgccgtgaatgacatgcacgcgcacttcgtcgttggagagcttctcgagggactgacggacagcttcaacagagccctgcacgtcggccttgacgatgaccttgagctccttcatctcgccttccttcatctgctcgaagaggttatccagcgtgaccttcgtctgggagttgaacatctcttccttctgctcggtaagacgctgctcaacgagctcacgtgccagacgctcgtcggaaacggcgttgaacgtatcgccgccgaccggcacttcgttgagacccgtgacctcaaccggcacggacggacctgcgctctttacgcgctcgccacgctcgttcatcatggcgcgaatacggccgaccgtggtacctgcgaccacgatgtcgccggtatgcagcgtaccgttctgcacgaggacggtcgcaaccgggccgcggcccttatcgaggcgcgcctcaatgacggtgccctttgcggcacggtccgggttcgccttgagctccttcatttccgcaacgagcagaatcatttcaaggagatcatcgatacccattttggtgtgtgcggaaaccgggatgcacggcacgtcgccgccccactcttccggcacgagctcgtattcggtgagctgctgcttgacgagatccggatttgcggccggtttatccattttgttgatggcaacgatgatggaaacgcccgctgccttagcgtggttgatagcttctaccgtctgcggcatgatgccgtcatcggctgcgacgaccagcacagcgatatccgtaaccatggcgcctcttgcgcgcatggtggtgaaggcggcgtgacccggcgtatcaaggaacgtaatgtccttgccgtcgatattgacgcggtatgcgccgatgtgctgcgtgatgccgccggcttcgcccgcggtaacgtttgcgtggcggatggcgtccagaatggaggtcttgccgtggtcaacgtggcccatgacaacgacgaccggtgcgcgcggcacaaggtttgcatcgtcgtcttcgctgtcgtcgatgatgcggtcttcgatggtgacgacgacctctttttcgacctttgcgtggaactcatcggcaatgagtacggcggtatcaaaatcgatggtgtcgttgatggtagcgaaaacgccgtttgccatgagcttcttgatgacttcggcgctcgttgccttcaggcggagggcaaactcgccgacggtaatctcatccggcacggtgatggtgatggcctttgccttgcgttccgccgcgatgcggttgagtctttccgcttccgtctcgcgctttgcgctgcgcggcttgccgcggcgctggctcttctggttgatcttctgctttgcggcaacggtgtcgttcttcaccttgtcatacgccagacggtcgtacttttcgttgtacttgtcgatgttgacgttgaccgttctggtatcgaccacgcggcggcgcggagcttcgcttgcggactcctgcgccggagtgttgttgctcggctggttgttctgcgcaggacgctgcggcttattctgctgcgcgttctggtttctgttattgccgttattgttgcggcggtcgttatttttgttgcgattattattgttattcacgttctgcttcttcggctcctgcgtgttcttagcggttttttcgctcggtttttccgctgttttctcggccggcttctcttcggtctttgccgcattgcgcgttgcaaagtacgcgtcaaagttctgtgcggcatgatcctgcgtgaagcggtcaaaaacgatatcgagctcgttttcttctaacgccgtcatgtgctttttcggctcttttacgtacttgccgaggatatccagcacttctttgttcggcacatccagatcctttgccacatcatgcactctgtatttaatcatcatatacgcatttcctctctttctccgtctgcgatgagctgcttcagtttttccgcaaatccgcggtcacacacggcaagcacaccggcctttttgccgatggctgcggaaatttcttccatggtaaacgcaggctccaaaacggatacatgatacttttccgcttcaaagcgcacgttcttcttcgttttgtccgaaaggtctgcggcaaggatcacaacgccgcacgcgccgctgcgcatggcttccacggcggtatcaaagccccagttgagctttcccgcacgtcttgcaaggcccaaagcggacagtgctctgttcatttttgcgactcgcccgcctttcctttcacatctgtacacagctcctgatacatggcgtcatacacggcgtcttcaattttacaggagaacgcgcgttcaaagcgccgcgccttctgtgcctttttcagacactcggggtccctgcaaacgtacgcgccgcggccgggcttgcggcctgtaaggtccaaagagacctcgccgcctgtctgcacaccgttctcatcttccttaacgggggcgcgcaccacgcgcaccagttcctttttcggcttcatttcaccgcatcccgcacacatacggagcggtattttcttttgtttcacgctgtatcacgttcctttctgcgagatgcaagtttcaaaagagcttacgcttcctcttcttcgccgaagaagccgctttccggcttaatgtcgatcttccagccggtcagcttagccgcaaggcgggcgttctggcccttgttgccgatagcgagggaaagctggctgtccggcacggtaaccttgcaaacgtgggaaccgtcctctgccgtttcaacggaaagcacggtcgccggtgcaagcgccgctgcaatgaactttgccgggtcttcgctatagtcgacaatgtccatcttctcgccgccaagctcgttgacgatgtcggaaacacgtgtgccgcgcgtaccgatgcaggcacccacagcgtctacgtccgggttatgggacataacggcgatcttcgttctggagccggcctcgcgggcaacggctttgatttctacggtgccgtcgaaaatttccggcacttccttttcaaacaggcggcggataagatccgggtgcgtgcgggagatgatagccttcgggcccttttcggtctccttaacgtctacaacgtagacctgtacgtggtcgccttccttgacgttttcggtgccgacctgctctcccttcggcaaaatggcttctgccttgccgatcttcagggacagcgcgccggtcttcggatctacgcgctctacaagggcgctgacaagctcctgatggcgacccttgaattcctgcatcatctggtcgcgctcgctgtcgcggatgccctgacggatgatgtttcttgcggtctgcgctgccacacggccaaactgttttgtatcgagacggtggcgcacaaagccgccaatctccgcgcgcgggtcgtactgcttgacgatttcaagtgcaatctcgcggttcgggttttccacttcttctacaatctccttgcgcaggaacacgtcaaacttgccgctttccggatccatgtcgatgacaacgtcctcgttgccgtagctgtttttgcaggcggtggcaatggccttcttaatcttatcgatcatgaaatcgaccgggatgcctttttccgcttctaggagcttcagagcctcaaacagctccttgccgtcattgttcacttcttttttctgcgctgcttttcttgccatttttcaaattacctgccttccggtattattctttcaaatttttgtattataaacgggagccttcccgggtcagtcataatcttcgatgaggttgacgctggcacattcttttctggtgaacgtgaccgtggtgtcctcctcggtgatgacctcaaagtcgccgttttcggcaacgtcgatgaggatgccctcgagctcgcgcacgccgttttcaagcgggcgaatgagctttacgcgcaccggcgcttcaaggaaagcctcaaagtgctccgggcgggtgagcttgcggttgatgccgggcgaggagacctccaaggtatattcctgcggaatggggtcttcgctgtccagcacggggttgatggcgcgggtgaggtctacgcagtcgtcgatgcctacgccgccttccttgtcaataaaaatgcgcagataccaatccgcgccctctttcgtgaacgtaacgtcccagattatgagcccaagctcctttgcgagcggctctgccagcgcgcgcacgatctccgtggtgctgcctttctttttctctgccatacgcagcttcctttctccgcccgcttttcggcggctgtgtctgttttggatatacaccctaatacaaacaaaagagcgggtcgccccactctttcatcatcctactatcttaccgtaaagattataccacagcgccgctttttttgcaaggagaaaaacaaagttttccgcacaaatacgggtgtatttttacgttttggcacggcatttttcacaggctgtttgcccctgccgcgcaaaacaacgtccgtgcgctttatttcccgaaaaacacaaaaaacagacgcgccgcctttttgcggtcacgtccgtcgtttgtgcttattttattccgctgcggattcaagctcggaggtcgtgctctcttcctcatcgtcctttacgggcttattctgcgcgatgacttcctttgcttccagaaccttctggatatcgctcatgcgcacggagccggtcggctgatcgttcagtgtggcaacggcgcggcgttcggatgccgggtctgcgtagaatttaatctcctcgctctttctgccgtcgaagaaatcgtacttgattgtgaggatcgggtcgccctgcggctcctgaatgtcctcgttcaaaacggagatggcgagcaacatctggtagaacggctggtagtaatcgtagttgatttccttgccgtccttcgagacttccaaatcgtagaatgtgttcgtctcggtggatttctcctcgttctcgatgcgggtcacgtcgtagacatccgtaccggtggatgaggtgagggtcacgcgggaaacgctcttgatgtacggcaggcgcacaaagccgtcgcgcagggaatacacttcaatattcacccaagaggtcacggcgctgtccgtgatggtgtagatcgttgtgtcgtcgtccaccatcatgctgtacaggtcgccggtcttatcgccaagcttaatgacatggtgctcatcgttcatcgtgtaatcgcacacagcgaccgggttatccagaccgtactttgcgatgtcttcttccgtagcatgtacggcgaggacaccggcagccgtcacgttttgcagctgctccacaaagtcgtcgatcttgccggagttcatgccggcgtaaatcggctctgtgatgtcgtacgcgagcacttcgtcatcggaaagaccgaactgaatttcttccggatagttctggccggaaaggtgcaggctgttgatttcgcttgtgctgtccgtctcggtaccgtccgtcgcagtgatggtcggcgtcggaattgcgatgagagacttattgaggaagtcgtacttagactgcttcaaatacgtggaaacgggcacgatgtacacttcgtcctcatacagcatgtaagagccggaggattcaccggccttattgccgatggtgaacgtctgggacgtgccgtccgtgtagttcatggtgatcttgtagccttcgccgctgccgagaccgtactcggagaggtcctctaccgcaccgaccttcttcgtcggcgtgatggagtataggcggtctgcaaggctctttacgttcgagtagagcacgtcaaggtcgtcccagccttcaatggtgaacgtctgctcggtgtcgccgctcgaggtggtcgtttccgtcgggatgatcgtatagctgtcgtccgcggcgaggtcttcaacgccgatgttcttcacgtcttcggcggtcttatcgatcagtgcgggctccgtgctctcggaaacggtgctggaactgcttgcgtcgtcttcactgtccttcggagacgtgagaatcagcgctgcggcagccgcgcccagcacgatgagcacaacgagcgtgatgataatgtattttgtggttttcttcatgggaagcaggttcctttcttcgacttacagatgtcttcttctgaggaagatgacaaggccgatgacaaggacgacaaccggcaccacaatggtgaacaggccaagaccgatggtctggatgaccgcggaggaagcgctgatatcaagcgtgttcgtctgggtctggttgacaacgaggcccacgcgggtatcggtcgtgccggtgaggttcttaatgaagtccagcgtatagtccttattgccgaaggtggagttgccgaggaaggtgctgaggtagcccatggagttgccgtctaccacaacattcgcgcaaatcttgccttgattatccatgtagcgctgtgcaagaccggtgatggtgtaggtatcggtgttcgggttttcctcaacctcctgtgtggtcgtgaggtaagcggtgtcgctcgtctccaaaatggaatacgtagcgatgtcgttgttggaggtaaacaggcgctttaccggtgctgctgcggcggcaatgacgttatcatacgtgccgctgagcactttatcagtgacatttgcaaaaagataagccggggaagcgtcctgcgtggtgagcacgttgttcatgtcgctctcgaacagcacaccggtctgcggctcaagaccccactctgcaaggaaggacttgaggttcggcatgtctgcccagctctgggtcgggtatgccgtgacatacagcgttctggaggaagccattttctcatcgtcgagatacgcttcaagcttagaaagctcttcggacgtatagtccgtggtcggcgtgccgagcacaacgatggaagcgtcttccggaatttcgtccgtcagcatgttgaactctttgacttcaaagttgttgtcgttgagcatgccggtaaacgtggaaaggttatcggaaacggtgagcatttcgttgtggcccgttgcgaatgcgacgaccggaacggtatcgaggttgacgaggtacagggcgtttgcaagcgcgccgtccaccttggagtagtagttatactggccggtggaagaatcctgctggatgctgaacaggtcggtaacggcgagcgtcttgtggcgcttatccgtcttgaccatgaccttaccggtcgtaagagagtcaccggcataatcgctgatgaactgcgggttcatgtccgggtcgatgtactcgactttgatcttgtcgttcagctcatgcagacggtctgcgaggttcgcgacctgactgtactttaagctgtaattggaatagacctcatcgccgcggatcgcgtcctcggagccgatgatgtaaatggtcgtttcgttgacgatctcctttgccacgtccgttgcttcatcgctcagggtattgaggccctctttcgtgaggtcgaagttcatggacggaaaacgcgtggtcagcgcagagaccagaacgttgatgacgataatcacggcgataaacacaaccgtgaacacaacggccaaagagccgtgcttgaatttttctttatgcaccgcggtctttactgcggaaaggttcggtttcttactcatctctatgctcctcccttagttccagcggcggctttccaccctgcgggcggtcaggaacacaaacacagccgccacgctgatgaagtacacgcagcttgaaacgctgaatatgccctgcgtgaaggtatcatatcgcgaggtgaacgagatccatgtgaggatggtgccgatgaagttgccggaaagcgcagacgcaatctggtcgacgaacatcaggaaaatggcaatgacgaacgtgccgatagccgcgatgacctggctgatggtgaggccggaaatgaacacaccgatggagatcatagccgcgccgtacagcagcgtgccgatgtagttgccaaagagaatgccccacgggaacgcggaggagaaaaagcccatcgtgatggccggcagcagtgccagggtgttcgcgatgaaatacacgccgaacgccgcgaggaacttgcccataacgatgcccgtcacgctgaccggcgccgtgatgagcgcctggtcggtcttattcttgcggtcatcgctcatgctgcgcatcgtgatgatcggcatgatcatcatgctgaacataaacatggtgctgaacacctgcgtgatgtacgagctggagccgatggccataacctgataatagaagaagccgtaaagcgcaagcagcgccgccacgacgacatagccgaccggggaagcgaagtacgctctcatctctcttttgaatattgctctcatttctctgcatcctccttcgtttcagcctcttcgggctcagatgcttcggtgttttcgggttctgtttccacttcaacctcaggctctgccggagcagcgtgggaagcatcgccgcttgtaagctgcaggaagacttcctccagcgtgaggtctgtgtttctcaaagccagcagcggccagcccttgcgggtgagcagtgcaaacaggttgcggcgcaggtcgtagttcggctcgccctcgatggaaatctcgaagacgcccttttccttctcgccgagggagtaaacctccacaatgtgctccatgccgcggatggcctgcagaatttcgctttccgggccgtcaatgcgcgcaatgatgcggtgctctgcggaaaggtcgtgcgccaacgtatccgttgcgccgtccgccacaagacagccgttgttcatgacaatcacgcgctcgcacacggcctgcacttcgggcaggatgtgggaggacagaataatcgtgtggtttctgccgaggctcttgatgaggttgcggatctcgatgatctgcttcgggtcaaggccgacggtgggctcgtccagaatgaggacaggcgggttgccgagcagagcctgcgcaatgccgacacgctgcttgtagcccttagacaggttgccgatgagacgagtgtagacgttgtcgatcttcgtcaggcggcagatctcgccgatgtgctgcttgcggtcgagcttgacgcccttcaactcatacatgaagttgaggtactctttgaccgtcatatccatgtaaagcggcggcagctccggcaggtagccgatgagctttttcacttcgttcgggttttccagggtatttttgccctgtaccgtgaccgaaccgctcgtggcggaaaggtacccggtgatgatattcatggttgtggatttacctgcaccgttcggcccgaggaagccgacgatggtgccctcttcaaccgtgaagctgacattgttcagcgcggtatttgtaccgtagcgcttcgtgaggtttttgacctcgatcatgtttgatgaccatcctttctctgcgggacggaaatatgtacccgggaaattcccgtgcaaagtcctccccaatggcgcccgcgcagctgcgcgtcgctcgaaacggttttgaacatgcggtgaaccttttgtggaaaaagggagaccgcttccggaaccgtttagatcctctgttttgggtttccgcgcccctatgcagggcagcggaagcgcacaaattatcataccgcagttttcgccgttttgcaatagccatgccgtatttcgggcaaaaaattaagtcaacactgcataaagaacgtgctttgcgcagtgttgacttaacaaaacaaacgataactttagttatccgcattatagcggctttctgtgacggctatgtgaaaaaacaattcgcaagtatgaacaaaatgtgaactcttcacaaaccgtacactgtctgtacacacgcggtatttcaaaaaatcattcgccgcgcagcaatgcgatctcggcggggatgttctccgcgcggaacacggctgtgcctgccacggcaacgtctgcaccgttttcgcggcagatgggcgcggtttcacggttcacaccgccgtccacctctaagatgagctccgggcgctttgcacgcagcgcgcgcagcttttccatttgatcagccatgaacttctggccgccgaagcccggctccaccgtcatgacgagcaccatataaaggcggtcgaggtacgggtacaggcactcaacgggtgtgcccggctttaaagacaacgccggctttacgccgtacttttcaatttcggtgatggtttcatcaatgtcgtcgtcgcactccacgtggaacgtgatgatctccgcgccggcctccgcaaactggcggatatactgcttcgggtgcgagatcatgaggtgcacatcaaacgtaaggtcgcttaacggacgcagtgccttgacgacatccgggccaaaactgatgttcggcacgaaatgaccgtccataatatcgaggtgcagccaatcggccgcgctgacggactttgcgcactcgcccatgcgggtaaagtcgcttgcgagcatagaaggtgcaattttcatttttaccacttctttctacgagaagaaatttacggattttgcagttaaaagttatctttttcgtcgtccttttcctgcattttattcatggcggcttccgctttccagcctctgcggttcagaataaagaacacgattgccagcacaacgagaacgatgaacgtgagcacttttaatacggcgcccggtgtgccctgaaacactttccaatccgggaaaagcgaatccaaaagccaccacacgccaagcacaaggaaaaatccgcctgcaacgtagaatatcttattctctttcgacagacggaaaatcaagatcagtcctgcaataagccacatggcagcatatacataacccatggtatcctatcctttctaaagacatacgccttatcttctctttgctgacctgctttattataacggatagtgccccaaaatacaaggaaatccgcagaaaatacacaaaatatcggaattctcacattttataaccgaaaattttcccttcttctccttttgcggagtaatgaagaattcacgctccccgcaaaacgcaaaaaggctgccgacaaaagccgacagccaatttcactgattatattgagatcagatcagctcaatgatcgccatctcagctgcgtcgccgcggcgcggcccgagcttcgtgatgcgggtgtagccgccgttacggtcagcatacttcggagcgatttccttgaacagcttgttcgtgacgctttccttggtgatgaaagccatgacgtttcttctgtttgcaagggtatcttccttcgcgattgtgatcatcttttcagcaagagcgcggacttcctgtgctcttgttgcagttgtctcgatctttccgttctcgaagaagaacgtaacgaggccgcgcagcatagccagtctatgtgcagtgtctcttccgagttttcttgttcccggcatgattgtcactcctatcgtttggtaatggtaattaaattattcatcgtccttgcggaggctgtagccgagctgcgcaagcttccagatgacttcttcaagcgacttgcggcccaggtttctgaccttcatcatgtcttcttcggactttgaaacaaggtcttccaccgtgttgatgccggcgcgctttaagcagttgaaggaacggacggaaaggtccaactcttcaatcgtcatcttgagcacctgtgcatcatcgctgccgctcttctctacgatggtatccatcgccttacccttttcggaaaggtcaacgaagaggttcagctggtctgtaaggatcttggcagcgagcgacaccgcctcttgtgcggtaataactccgtttgtccatacctcaagggtcagcttgtcgaaatcgatgcgctggcctacacgggcaggctctacgttaaagttaacctttaacaccggtgtgtaaatagaatcaactgccaattcaccgatcacgccctgcggcatattctgcttgttgcgttcaccggaaacatagccgcggccctcatcgagcacgatctccatgtacagctttgcgccttcaccaagcgttgcaatgtgcaggtccgggttcaggatctctacttcgctgtcgcacttgatggaatctgccgttacgatgcaggggccttcagcagaaatctccacggttttcgggccttcgcagtgcaacttggcaatgagacccttgatgttcagaacgatttcggtgacatcttccttaacacccggaatggtggagaactcgtgtacgacgccgtcgatcttgatcgacttcggggctacacccggcaggctggaaagaagcacacggcgcaggctgttgcccagcgtagtgccgaagccgcgctccagcggctctaccataaaccggccgtaagtgttatcgttggataattcctcggtctctattctcggtctttgtatcatctcaatcatttgcgatcctcctttacacatttgacgtaattcgtaaaacccataaaataatgttaagttttactggattacttggagtacaactcaacgatgagatgctcttctacctcaaattcaatgtcgctgcgctccggcatgcgaaggatcttgccctcaagggcttccttgttgcgctccatccactcgggagtggtgacgagcggtgcgtctgcgccggtgagcttggagaacttcacgctgctgcggctagcttcacgcacagcaatgacgtcgcccggcttcacaaggtaagacggaatgttgaccttcttgccgttcacggtgaagtgaccgtggttgacaagctggcgtgcgtcgcggcgggtggaagcaaagccgagacggaacacaacgttatcgagacgacgctccagcagacgaagcaggttttcgcccgtcatgccggcctgacgctcagccatatcaaaatagcttgcaaactggtgctccagaacgccgtaaataaacttcagtttctgcttctccttgagctgagttgcatattcagactgctttctgcgcataccgttgcccggattgcggatggtggtcttcttgctgtaacccataacggccggagaaatgcccagcgctttgcagcgctttgcaatgggctgtctgttcttagccatattctgtaacctcctaatctgttatacgcgtcttctcttcggcgggcggcatccgttgtgcgggatcggcgttacgtctttgatcatgctgacctcaagacctgccgactgcagtgcacggatagcggcttcacggcctgcgcccgggcccttaacatagacttctacgctcttcatgccatgctccatagcaatcttagccgcggtctccgcagcggtctgtgctgcgaacggcgtggactttctggaaccacggaaaccgagctcgccggcgcttgcccaggataccgcattgccctgcgtatcagtgatggttacgatcgtgttgttgaaggtggactggatatgtgcagcgccacgctcaatattcttgcgctcacggcgtctgcggactgcggttactgctttctttccgccttttgtagctgccatttaaaatccctcccgattacttcttcttgttggccatggtctttctcggacccttgcgcgttcttgcgttggtcttagagcgctggcctcttaccggcaggcccttgcggtgacggacaccgcggtagcagccgatttcaacgagtctcttgatatcgaacgcaacattacggcggaggtcgccctcaacggtgtagtggtggtcgatatattctctcaactttgtagcgtcatcttcagaaagatctcttacgcggatgtccggatcaacgcccgtagcagcgcagatgtccgacgctgtcttgcggccgatgccgaagatgtaggtaagagcaatctcgattcttttgtctctgggtaaatcaataccagcaatacgagccatgcttattgcacctccataaatatttcagagcctcagccctggcgctgcttgtgcttcgggttttcacagatgaccatgactttacccttgcgcttgatgatcttgcatttttcacacatcttcttaacagaaggtctgactttcatttgtgtgccctccttatgcgttgtggggtcttcaaatctattttatcttacttggaacgccacgtaatgcgtccctttgtcagatcgtacgggctcatttccagtgtgaccttatcgcccggaaggatgcggatgaaattcatgcgcagcttgccggagatgtgagccaggatcatatgcccgcccgggatctctacctggaacgtcgcgttcggcagagcttcctttacgattccttctacttcaattacgtcctgctttgacattcttgtctcaccaatccttacatttaaatgttacgttgtgtgcgctctgtatgctgtgagcgccgtgcgtatttgtcgattggtcgaaaggctctcttcgctgagcaccgtcgccgtcggggctaaatgcatcagctttttctttttcggtgcttccatcctgcgacgtttgccgtctgccatgtaggcatacgcgccgtccgttttcagcaccacctgaaaatcgcctttatcatgacctttaagcgaccgcataatctgtccgcgtacacagtccatctgacacctcaatccagcgatgtgaggatcacagggccgtcgggtgtaatggctatactgtgttcaaagtgggcggcaagcttgccgtccttcgtcacggtggtccagccgtctttgagaattttaacctcgcagctgccctgcgtgaccatgggctcgatcgcgatcgtcatgcccggtaacaggcgtacacccctgccgggggtgccgtaatttggaacactggggtcttcatgcagcttcgcacctacgccgtggccgacaaattcccgtaccaccgagtaattgcgagcttcgacatactgctgcactgcggagccgatatcgccgatgcggttgcccggcacagccttttcaatcgcaaggaacaggctctctcgggtcgcatccatcagcttctgtgcttcctcggaaaccttgccgcacgggaaggtccatgcgttgtctccgttgaatccctcatagattgcgccaacgtcaatggagacgatgtcgccctctttgagaatttcgtgtgctgaaggtatgccgtggataaccacattatttaccgaaatgcaggcgctcgccggaaaaccgccataaccgagaaagctgggcacggcgcccgccttctcgattgttcttctgacgatcttgtccagttcgagtgtagaaacacccggacggaccgcttcaccggccttcagcaatgcttcctgcgaaatctttcccgcgtcacgcatacaacgcagttcacgggtcgttttcaggttaatcatgcttacgcctctaatgctttgagtgtgagggcggtcgtatcggcgacctcctcctgaccttctacgatgtgcagcttgccctgcttctcgtagtattcctttaagggctcggtctgctcgtgatagacgcgcagacggtccttaacggtatccgggtggtcatccttgcgctgaacaagggtgccgccgcagttcgtgcagacgccttccactgccggcttcttgtaaagcaggtggtaggaagagccgcacttttcgcagacacggcgtccggacattctcgtgacgatcttctcgtcgggcacttcgatatcgatgacccgatcgatcacaacgccggaagcgtccagagcctcggcctgcggaatggttctcgggaaaccgtcgaggataaaaccgtttttgcagtcttcctctgccagacggtccttgatgataccgatgacgatctcatccgggacaagctggccggcgtccataaaggctttcgccttgaggcccatttccgtgccgcttttcagcgcctctctcagaatattgcccgtagaaatggcgggtattccgagatgtttgcagataacttctgcctgggtgcctttaccggcacccggtgcacctaaaaggatcagcttcattgttcatgactcctttcgtatcttatgcgcccgggggcttaatcaaggaagcccttgtagtgacgcatcatcatctgagattcgatctgctttacagtctccagcgcaacgccgaccatgatgatgacggacgtgccgcccatggaaaggccatacatgccggtgaggttgctgtaaaggatcggcaggatcgcaacgaacgcgaggaaaatcgcgccgatgagcgttatcttggaaaggatcttgctgatgaactccgccgtcggacggcccggacggatgccggggatcgtaccgttattggtgcggaggttgttcgccatttcaatcgggttgtactggatcgtcatgtagaagtaagcaaacacaacgatgagcagcaggtacagaacactgtacagccaaccggtggaggagaaggcattgaagaagcccttccagaagccggtcggttcgccgacaaagaggcgaatggtgctcggaatggagaggatcgcagacgcgaagatgaccggcataacgccgctcatggtcactttgatcggcaggaacgtgctctgaccgccgtaaacctttctgccaacgaccttcttagcatactgcaccggaatgcggcgctcggaatcgttcatgaaaacgatgacccaaatgaccgcgaggaaaaggatgatgaacagcggtgcaaagacaaagtacttgccgtagctctccggagactgcattgcagccgagaagtagctccagatctgacccatcgtaaccggaagacgtgcgacgataccggcaaacaagatgatggagatgccgttgcctacgcccttctggttgatctgctcacccatccacatgatcagcgccgtgccggcggtgaacgtgagaacaataatgatcgcagtaaatactgcggagaaaccttcattgtacagggtaattttattgtttctcaggtagaaataataagcggtaccctgaatgaggccgagacccaccgtggtgtatctcgtaatggcagcaattttctttctgccttcttcgccttccttcgccatgcgctccaaggcgggaatcgccaccgtgaggagctgaatgatgatggaagagttgatgtacggggtgatgcccattgcaaacagcgttgcatttgcgaacgcgccgcccgttaacatattgatataacccagtgcagtttcattggcgcttgccatcagcgtgttgagcgcggaaacgttcaggaacggtaccggcacaacagagccgaaacggaaagcaatgatgatcaaaagcgtatacaggagtttcttacggagatccgggatcctccaagcgtttttgagtgtattaaacacttagatcacctcggccttcccacctgcagcctcaattttcgccttggctgcttcggagaaagcgttagccttaacggtaacctttttggtcagcgcgccattggaaagaaccttaacaccgtcgcatgcagacttgatgatgcctgcttcaacgagtgctgcctgatcgacgactgcgccgtcttcaaaggcgttgagggcgttcaggttgatcgcaacgatctccttagcgaagatattgttgaaacctctcttcgggattcttctctgcagcggcatctgaccgccttcaaaaccggggcggaaaccgtggcccgctcttgccttctgacctttgtggcccttaccggctgttttaccgttgccggagccatgacctctgccgatgcgctttgcgtcctgcattgcgcccggggtagctctgagttcattgagcttcattcaaacacacctccttagcctttgataacctcgaccaaatgaatgatcttcttgattttgccctctgtttgtgcattatcgggctgagtggttgtatcgccgaccttatgcaggccgagcgcctcggcggttgcaatctggggctttttgcagccgatgaggctctttttcaacgtaatctttacgtctgccatattgcaaacctccttacagaatttcacttacggacttgccgcgaacagctgcaacctcttctgcggttctcagctcggagagaccggcgagggttgcgcgtacaacgttgcacgggttgttggaacgcagtgcctttgtacggatgtccttgatgccaacgctttcaacaacggcacgaaccgggccgcctgcgataacgccggtaccgggtgctgccggctttaagagaacacggcctgcgccgaattcgccgacgatctcgtgcgggatggtggagccgcgcagagcaaccttctgcaggttcttcttagcgtcttcaatgcccttgcggatcgcgtccggaacttcgccggacttgccgatgccaaagcctacgatgccgttgccgtcaccgacaacaacaagagcggcaaacttaaagatacggccgcctttaacggtcttggaaacgcggttgatagcaactacgcgctccttcagatcgagtgtggatgcgtcaattttcatagccaaaacaatattcctccttcttagaagttgaggccgccctcgcgggcgccgtcggccagctctttgacgcggccgtggaagatatagccgccgcggtcgaagaccacatcggtgatacccttttctgctgctctttctgcgatcagcttgcctactgcgtgtgctgcttctttgtttccgccgttgccggtaaacgccttctcaaccgaggatgctgcgcacagtgtaacaccgttcacatcatcgatgatctgagcgtaaatatgcatattggagcggaaaacatcgaggcgcggtctttccggtgtgccgctgatcttgccgcgaactctcttgtggcggcgcagtctggctacgttcttatctgccttactaaccatttttatctcactcctaacctattatttacccttaccggtcttgccttccttgcggcgaacaacttcatcaatgtacttgatgcccttgcccttgtacggctccggcggtctcttctcgcggacttccgctgcgaactggccgaccttctgcttgtcgatgccattgatgatgatcttgttcggagccggaacgtcgatcttgatctcgtccgtttccggaacgatgacctgatgcgagaaaccgaggttcataaccaggtttgtgccctgcttctgaacacggtagccaacaccgttgacttcgagctctttcttaaagccttccgttacacccacgatcatgttgtggataagggtacgggtgaggccgtgcagagaacggttctctttgtcgtcgttcggacgtgtaacaacaatctcagcgccctccacagcgatgttcatgctcggctggaacttctgagtcagcgtgcccttcgggcccttgaccgttacgcagctaccgtctaccttaacctcgacgcctgcgggaatatttatcggttttcttccaattctggacatgttattgcacctccctgattaccaaatgaacgcgagaacttcgccgccgatgttcatctttcttgcctcgcggtcggtcataacgcccttagaggtggagatgacggcggtgccgaggcccttcatgaccttcggcagctctgctgcgttggaatagatgcggagacccggcttggagactctcttgaggcccttgattgccggcacgccgccttcaacatacttcagtgttacggtgatgacgccctgtttgccgtcctcggtaaccgtaaagctcttgacataaccttcgtcaacaagaatctggcaaatagccttcttcatgttagaagcagggatgtcaacagtgtcatgcttcgcagactgagcgttgcggatacgggtaagcaggtcagcgattgtatctgtaatctgcatgatttattaacctcctataaagcttttaccagcttgctttcttaacacccgggatctggcccttataagccagctcacggaagcagatacggcagatgccgaacttgcgaaggtaggcatgcggcctgccacagatcttgcatctgttatattcgcgcgtagagaacttctgctctctctgctgcttgagtttcattgaagtcttggccacagtattccctccttacttttcaaacggagcgcccatgagcttcaggagctcgcggccctcttcatcggtatttgccgtcgtaacgaagcacacatccatgccgcggaccttgtcgatcttatcgtactcgatctcagggaagatgagctgctctttgatacccaggctgtaattgcctctgccgtcgaaggagttggggttgatgccgcggaagtcacgcacgcgcggaagcgctacgttgaacaggcggtccatgaactcccacatcttctcgccgcgcagcgttaccttaacgccgatcggcatgccttcacggagcttgaagtttgcaacggacttcttagctctgcaaacgatgggcttctggccggtgatcatcgcgaggtcgccggaaatggaatcgatgaccttcgcgttgtcttttgcctcgccggcgccgacattgatcacaattttatcgagcttcgggatctgcataacgctcttgtagccgaacttcgtcatgagagcgggtgcgacctctgctttgtaaaaatcattcagtcttgccattttattccctccagattaaagcgactcgccgcattttttgcaaatgcgctcttttgtgccatcctcaagcactttgtgggtgacacgggtcggcttgccgcagcgggggcaaacaacctggaccttgcaggcgtagatcgcggactctgccttgatgatgccgccggcctcgcccatcttgcggggctttacgtgcttagagacaatgttggcattctctacgatgaccttgccctctttcggggaaacagccatgatcttgcccttcttgccgcggtctttaccgctgaggataacgacggtgtcaccggttttaacatgaactttactcatttcaggacacctccaattaaagaacttccggggcgagggacagaatcttcatgtattccttgtcgcgcagttcgcgagcgaccggcccgaagatacgtgtgcctctggggtttttatcatcacggatgatgacggctgcgttttcgtcgaaacgaatgtaggtgccgtcttcgcggcgaacgccggatgcggatcttacgataaccgccttaactacgtcgcccttcttaacaactccgccgggtgctgcttttttaacagatgctaccacgacgtcgccgatatttgcatacctccggcctgtaccaccgagaacgcggatgcacataagctccttcgctcctgtgttgtcggccaccttgaggtaagtctgctgctgaatcacagtaaattcctccttctgctaaagccgattatttggctttctcgataatctcaaccagacgccatctcttatccttagagaggggacgagtttccataatacgcactctgtcgccgatgccgcagacgttctcttcgtcatgggcttttctcttaacggtacgcttgatgatcttgttgtaaagcggatgtctgtaactgtcctcaacagcaacaacgattgtcttatccatcttattgctgacgaccttgccgacagttgtctttctcatgtttctttcgctcacgtctaatcctcccttcccttatgcgttctctttgctaagctcattcgcacggataactgtcttaacacgagcgatgtccttcttaaccgccgagatgcgcatcgggttttcgagctggttaatagcgagctggaatctgaggttaaagagctcagccttgaggtcattcagttttgtgttcagctcttctgctgtgagctgtctgatttcagaagctttcattactcttagccctcctcttttgctacaaacttgcacttaatcggaagcttgttgcttgcaaggcgaagtgcctcacgtgcagtctcttccgaaacaccgccgagctcgaacataactctgccgggcttaacgacggctacccagtactccggggaacctttaccggaacccattcgggtttcagccggcttctgtgtgatcggcttgtccgggaaaattttgatccaaactttaccgaaacgcttgcagtaacgcgtcatagcaacacgggctgcttcgatctggttggaggtgatccatgcgggctcaagagcctgaaggccgaagtcgccgtatgtcaccttattgccgcgatatgccttaccggtcaggcgacctctgtgcactctgcggtatttaactctcttaggcagtaacattacgcacgtcctccttctctcttattgtttctgcgggtgttgttgctctcgttgagcacttcgcccttgtacagccaaaccttaacgccgatgcggccgtaggtggtagctgcttctgcaaagccgtaatcgatgtccgcacggatggtctgcagcggaatggtaccgtcatgatactgctcgcttcttgcgatttccgcaccattcaaacggccggagcacatgatcttgataccctttgcgccgagcttcatagagcggccgatgcactgcttcatcgcacgtctgaatgcgattctcttttcgagctgctgtgcaacgttctctgctacgagctgtgcgtcgaggtccgggcgcttaacttcaacaatgttgataacgaccggcttgccgagctgcttctcgcactgtgcgcggagcttctcgatttctgcgccgcccttaccgatgaccataccgggctttgcgcagtgaatgtgaatgcgaaccttggaggcatcgcgctcaatttcaatcttcggaacacctgcgaggtagagctgcttcttcagcgttttgcggaggttgtagtcctcaacgagcgtatcgccgaaatcagctttctttgcgaaccagcgggaatcccagtctttgatgacgcccacgcgtaagccgtggggattaactttctgacccatttatgtgacctcctcgcttattccttctctttcacaacgagtgtgacatgagaggttctcttcaaaattctgtaagctcttccctgagctctcgggcggattctcttgagcatcggacccgggcaaacgtagcactcggaaacatagaggttgtttctgtccatgttgaagttgttctctgcgtttgcgatcgcgctcttgaggagcttctcgagatcttcgcacgccgccttcggggtgtgcttcaggattgccattgcgaggtcaacgggcttgtttctgatgaggtccagaacgatctcaaccttgcggggagaaattcgggtatacttcagaactgcttttgcttccatcttatactctcctttctcttagcggctggtcttggaaccggcgtgacccttgaaggtgcgggtcggggcgaactcgccgagcttgtgaccgaccatatcttctgtcacgtaaaccggaacgtgcttgcggccgtcatggacggcgattgtgtgaccgacgaaatccgggaagatcatggaagcgcggctccatgtcttgacgatcttcttttcgccgttctcattcattgcctgaatccttttaagcagtgcgggctgacaaaaaggacccttttttaagcttctgctcatgttcttttaagctcctttccgtgccttacttaccgtttctgcgcttaacgatgaacttgttgcttgccttcttcttggaacgagtcttataaccaagagccggcttgccccacggtgtaaccgggcccgggcgaccaacagggctcttgccctcaccgccgccgtgcgggtggtcattcgggttcatgacggaacctctgacggtcggtctccaacccatgtttctcttacggccagccttaccgatcttcacgttctcgtggtcgatattggaaacctggccgacggttgccatgcaggcatccggaacatttctcagctcgccggacgggagtctcagcagagccatgccgttttccttagccatcagctgagccatgatgccggctgcacgggcaagctgtgcgcccttgccgggataaagctcaacgttgtggacaaaggtaccggtggggatatttgcgagcggcagtgcgttgccgggcttaatatctgcatccttaccggagaacacctgatcgccgaccttcaggccgttcggtgcgatgatgtatctcttctcgccgtcttcgtactgcacgagtgcgatgaaagcggaacggttcgggtcgtactcgagggtgaggaccgtagcagccatgtcgttcttctggcgcttgaagtcgatcacacggtacttcttgcggttgccgccgcctctgtggcgaacggtgattctgccgtagctgttgcggccggcagctttattcttcggagccagcaggctcttctccggacccgtcttgctcaatgcgctgaagtccgtggtggacatgttgcggcgagcattcgtagtcggcttatagttaatgattgccattgtgtttcactccttgtttggctttgcgggatcgggcaaattcccattcatgcccttggggttcgaattactcgagccgaattaaaccatggactcgaagaactcgatggacttgctgccctcggtgagggttacaacagcctttttccaagctctggtgtagccttcatatctgccctggcggcggaacttgccgcgaacattcagggtgttgaccttctgaaccttgacgccgaacagctcttcaaccgccttagcgatttcaatcttgtttgcatcctggcagacttcaaatgtgtacttcttattcgcaacgccggtcatggatttctccgtgatgatggggcgaatgacgatgtcctgcgctttcattatgcgtacacctcctcaattttggagacggcatcctttacaacgatgaacttgtccgcgttgaggatgtcatatacgttcagcgtgttgacctgtgcggtcttaacgcccgggatgttcgctgcggaagcgatgacctgtgcatcgacctcggagagaacgatgagcgccttcttctcgctgccgagcgccttgagcatctcagcaaccttcttcgtcttgtaaccctcggttgcgatggaatcgacaacgatcatttcgttatcctgaaccttgctggagagtgcggacttcatagcgagacgcttcaccttcttgttgagggtgacggtgtaatctctcggcttcggtgcgaacacgatgccgccgtgtgtccactgcggagctctggtggagccctgtcttgcacggcctgtgcccttctgtctccacggctttctgccgccgccggaaacttcggaacgggtgagggcggactgtgtgccctgtctctggtttgcgagatacgccttgaccatatcattcatgacggaaacgttcggttcaataccgaaaacgccttctgcaagctcgatcttttcgacctctttgcctgccatgttcaaaactgctactgtaggcattctttattcctccttcccttacgctttcacgctgtcgcgcagaacaacggtgccgccgttcgggcccggaatagcgcccttaactgcgatgagattgttttctgcgtctaccttgacaacagcgaggttctggactgtgaccttctctgcgccgaggtgaccagccatcttcaggcccttccaaactctggacgggctggagcaagcaccgttggaaccgccgtggcgtgcaaccgggccggaaccgtgggtctctttaagtctctggaaattccagcgcttgatgacgccggcgtaacccttacctttgctggtgcccgttacatcgaccttgtcgccgtttgcgaacacgtcagccttgatgaggtcgcctacgttgtaagcgccgcaatcgctgaatctgaattccttcagggtcttcttcggggcaacgtcgcccttcttgaagtggccggtgagcggcttgctcacgcgctgcggcttctgatcgccgaagccaacctgaactgcatcgtagccgtcgttttcaacagtcttcttctgtgtgacaacacacggaccggcttcaacaactgttacgggcacgactctgcccttttcgtcgaagatctgcgtcatgccgatcttcttgccgatgattgctttctgcattttgtatcctcctttaggttattggtcggatctctccgacatgaccctcctgcctgtaggttgagcggttatctgccgaacgaaatcagagcttgatttcgatctcaacaccggcggggagctctaagcccatcaacgcctcaacggttttgttgctgggtctcaggatgtcgataagtctcttatgggttctcatctcgaactgctcacggctgtccttgtacttatgaacagcgcgcagaatcgtgacgatctgcttctctgtcggcagcggtaccgggccggaaactcttgcgcccgtgcgctttgcggtctgcacgatcttttcagctgcctgatcgacaacctgatgatcgtaacccttaattctaatcctgatcttttctttgactgccacttaaatcgcctcctgttaaattttagttggcgggcggggtttttatgaacactggcccgggtgtttcaccaagaagccatataaaaaccggatattcacttttgtgaaatccgggacgcttttgggtcggtgtaaaatcacaaaaccctcataaaaaaccattgatctgccttttttgtccggcctgtgcgccttagaaatcaacgcatggttccgcgcgccactcccgtaggagccgctcagcgtatcaagttgtgtcgcccggtttgaaatcggacatactccacggaaaaaccggcatgtctcagccgcaacctcccgcttcatcgcatatctgtcgcagtcacgcaagtattattataacaggcaaagtatgaaattgcaaccccttttttcgaaaaatttttcagcttttctgcgggtttttccgttttttcaatttgcgccgtatcttgtgctttcacctgcgcggcatacaaccgatgaagcagaaaccgggacggcccgaccgccccgtctttctttctatcgcacactttctatgcatctacaggctctacgcgcaggaaatccatcgtttccgccggctcacgcccgtctgcagagaacacgaaccgcttatcctgcccatcgtccatgacctcgaaaaaggcggtcgtgccgtcggcgccgtacacaaagcgcagcgtctcaattgcgtttgacgcgggatcataccagccgccgtccgcatggcggatcggcccgtccggaaacgtcagctcccacaggcaatccaccggctcgtagattttcgttccctgcgccgtctccaccgtaaacgacgctcgcagctccgtcctacgcagaaaccggcacagccgccagcccttggcctccagcgcggcgggctccgccgccgtactgccctccacccgcacgccggagagggaaatatgaaacggcaggggcagcggcacaagccagagtacaagcgcgagcagcacgatgcccacgcagacccgcccgataattttccggtttaatttcttcacagtaatacccctatcataagaaactagcggtttaatgtatgggcaatcttcacttccgatccatatctataccgcgccggacctgttgtatcctatctattattgtcaacagttcattaatatttttgaaatattatttaaccccccttgataacatgtctcttgttatcaaggggggttaactttatttaccagcctgcgcgcacaacgtagacgatcatatcacgtctgccgaatgcggtgcagtcttccagcgtatcgtagtagaggtctgccacgatgtcgccgcacatggccgctccgccggtgtccatggcgtagcagtagccatatgtccacgagccgtccaccgcggtgatgtacagcagcgaaccgtacgggatacggtttgggtctacggcgacataaccgacctgcggtgtagcgccgatggatgtgacggcgcctgccggtgcatagtatgcagtgcaggaacccgtaaggctatactcaaaggaggacggtgcgccggaagcatccgtgaagacgttctgcttctcttttgtaccgcgcagcacgaccgcgttcttcgcttcctttaaaacttctttcgtcttgacgacgcggttttcttcctcgccgtccgcatacgtgaccgtgtaggtaactttggcttcgccttccacgccctcggtcttcgtctccgtttcgccctcatagagctcttcggtatcttcgtataccgtgctgtacgcgacagcttcgttctcggtgatctcttcggtgcggatgcgcacaacgcggatcacatcgccgctcgatacgttatcctctgctttcacctgcttttcaccctctgcggtcgcgaccagaatgcggtcgttctcgccgagcgtaatgcccatggcttctacggcatcactgtaattttcagcggcaacgctcttctcggtcgttttgccgtctgccgtaacggtgaggtcaaggtaacgctgcacgcggatgcgcataccgtttgtaagtgcggtatccatggccggtgtgacggtgtcgttttcgccgagcgtgatgccggcggctttcagcgcgtcttctacggtgccctcgttgaggtcttccatgcggcgcttgccgtctgccgaaacaaacacacgctttgcacgggtgatctgcacggcgatgtctgccgtaagcgcggcggtgagatcggcatctgccgtatctcttgcgccgagcgtaatctcgttttccgcaaacacgtcggaaagcgttttgcctttcggggctaaaatcatctgggaggcgttatcctccttgacggaaacgcgcacaaagcgctgcacggtgagcgtgccgttctccggggagaagtcgtaggtatcgatgtccgaaacgggcgccatgccctcggtctgcgcgcgggaaagaatatcctgcgggttctgaccgatcatactgaatctgtatgtttcggagccgtcatatacggtgatatcggcggtatttgccataaccgtaacaacggaagagatgctgagcgctgcaaccagaacgacgatcagaaggatcttcggcatcaggctcttttgctgttttctaacatgccgcatagctcttgctcctttcaaaaaactgtgaagcgttttgcgcttcgatttggcaaagcttcggcggccaccccgccctcttgctttgcgtccactaccttttctgacctttgaaatacgggtacaaaatgctcttaccaaaagtcatttgagagtataatgtgaaaatgatggtctgtcaagttttttgaaaggttatttttgtgcaatatgctgagttacgcatggcgttttaatttacataacaactcatttgatatttttgaaagcggttatttgccttttttacggaacttttttgcggcgctctgtgcaatttgcaaaaattttgcaaaggcaaaaacatcgaacaaattttcttataccttaatattgtatattcttgcatattcatttcgatgaatttcgcgaactttctgcgttttcccattttatatcgtatattgttccgaatttgatacattccatgtgctgtgcggcacttttcctttacagcagaatttttcaaaaaaccgcggtcaaaaggcaggtatatttcataaaaagcgtgctgtattttgggcagctctccgaaaaaatcgcatttgcggctttggaaagcgggatgtccgtttcaatcaggccgattttgtgtcgaaatgcgtctcaccgtgtccgcagaaaaaattatcgtcaaccgatgtatagaatacacatgttaagtttacataatccgcgttttacatagagttttgtttccgtgccgcgcacgtttttgatttgcttcttatatataatagaacatcacgggcagctttttagggccgaccgtgatgctttatctcatgtgttctgtttctttatataagcgataagttcgtttgccgcggtgcggtgtgcgcccacaccggggtggtcacggcagccgcgatttttgaggtcatccgtcagcgacagaaattccgcgttcgtgtcgcccgtttccgctttgtaatcgtctatggccttttgcagcgccggggcaagctccaagccgagcataccgtagatccacacaagacgggcgttggggtaatacccacgcaattgctttaaaaacgcggtcgcgccgtgcgcaaaacgcgcttcgtcttcggggttcagcttaccgtcttccgtacggcggttctgaaacgtctcgccggttgtttcatctgtccaggcaggctgtgaaaacgcaccgcagtcgtttgtaccgaggttgatgaagacgtaattcggctgccattttgtgaaatcatacggctctctcgcgccgagggcaatgtttttttcgccgctcaaaagaccgcaaagctgcccgtagatgggcggaatggcgctgtttgggtcattgttccagccgcagcacacgccccagccactctgcgacgagacacggatatcggcgtttaaagcacgggacaccatgacagcgtagttattctccgcgctgaagaacatggaaatccagtctgtttccgctttcgcgccgatgtcgccctcgccgctcgtgatactgtcaccgatgaattcgatttttaaattgcgctctggcacgggcaggaattcgccgtctgtttcgacggcattaatctgcaaaacactctccgggtcggcgttcatggcctgcgtatctttaaaggtgcgcacgttcttgaccttttcggggtccatgccgcggaacacgcacacgcgctccgtgcccttctgcgccatgcggcgggaaaagaactcgccattcaccataaagctgtaccatggctcgtggatgtcccaatccgccgtaaattccacccacaactcgctgccgcgcacattaagctctaagcccgccgccgtccagaacagcgtgagcggcgttaacgagccgtttgtgcgcccgtgcacaaggtgcggaacttcgggtaaggtatatcgtttgacttcgctcattttgcctccgcctcggcaagttccttcttataaagatacttgtcaatgtcttccttgatattgtccggaatcttcttttccaccgggaataccgccgcattgatcagcgtatcggcatacgtgagcacaatctccagcgttttgccgagtgcctctgcggaaaggaactccatggtatcaaaacggttgtggatatacgccgcaccttttgcaccgtcgcgggagaagttgattgccggaataccgttatccgcaaacgggatggaatcggaagaataaatgctctggcgcgtcacagcggagaggccgttgattttgagcatgtaatcggtgtagtgtacgagggattcctcgcctgtgacagccgccgtgttatagccgaggatcggcgcaccgacgtcaacgttaatcatgaagacgtgatctttcagctcatccttgtggtcgcgcacgaatgccttactgccctcgagtccaatctcctcgctgccgtaccagcagaactttacggtacgcttcggcgggtgctgcgcgaaccaacgcgccgcttccatgttgataacggagcctgcgccgttatcatatacgcctttggaaaattcaacggaatcataatgtgcgccgaaggagatgatctgctccgggtgctcggtgcccttgatctccgcaatcacattgtgcgacgtgagtgtaatgttcttgttctgtacagtaacctttgcgcgggatgcacctttgttgacgatctccatagcgtccacggtgcgcagctgtactgccggtgcattgccgaacgtacgcagcgcactgcgcagcttgcgctgctgaaggtcggtattctcgaggtcatcgtgaatatcgccgtccatggtgacgacagctgcggcgcccgcttccatcaggctgcggtacagcggcacgcgcaggaagccgttgacgagcacaatcttgcccttgacattcaacaggtcgaccggaagcgcgttttccacgtagacaaaatccgccgtaaggccgtctgcggcggtgctttccgcgcactggtaaccgcgcacggtgtagctcttgcggtacggctccagaatctcgaaggtcgcttccacttcggcggattcgatctcaaacggctcaatcacggcggacaaaccgaagctttcacactccgctttcaggatttccgcggcttttaattcttctgaggagccggccacgcgcgtaaagccgattttatcgagcagtgcgaacgcacggttttcgtcatattttttcaatgtaaacaactgcctttctctttgattttatacggtatttattcctattatatagtatagaaaataaattgcaagcaattttgcgccaaaatgaaagtgtacggctttaaaaatgcaaaaagcagggtcattccccgcttttggagaataatcctgcaattttgcatatgaattcacttaaaatgcttgtgtgcagacgaatttaatctcttcgatctccataccggtctggccgaagtagagcttgagataattcgtgccgccgaacagcacgccgatgtcctgctctgcggtaacgacctcgccgttcgtgccgttgatcatgaccatgccgcgcaggttaccgtcgatgaagatagacatcggaatctgcgccacttcattggcgttcgcttttacgcgcatgacaaacttatagaggccgtttttcttatagcggatgccgagaacggtggaagcgcctttttccgtattgactgcggaaatgtcgagcggagcttcgtcatcaataaactgatactcgccgctgaaatcgacgtaatcttcgctcgtcttctccgcttctgcggcttcgcgctcctcatcgctcatgcggccgaggctgcgctccatcacaggcgagttcatcacggtgcggcagatattcatcgcagagcgcacgagcgcgtcacgcgtcagtctgccgtctgcaagggcgtcgtccaaattatcgtgttggctgttcgaggcggcgtccgcgttaaccatgttgaggtcattctgcgcgcgcacctgtgcggcgacgttctcgcgggtggcttcttcgccctcgcgatcgttgccctttgcccaccagtcggtcataacggtacctgtgaagccccactcgtcgcgcaagatggtcgtgagcaggtcgaagttgctggccgtccaaataccgttcagaccaccgtaggtggacatgacggagtatgcgccgccctcttttacggccgtttcaaacgcgcgcaggtaaatttcacgcagtgcgcgctcggaaaggacggaatcgatctcggttctcttaaactcctggttgttgcaggcaaagtgcttgatggtgccggtgacaccgaagcggcgcataccgcgcagctgtgcggcggcgagcttgccggtgagcagcgggtcctccgagaaatactcaaagtttctgccgtttaaggggctgcggtggatattgagacccgggccgagaagtgtgtcgacgcggtttttgcgctgctccttgccttgcatagtgaaaagctcttcattcagcttttcgttaaaggtgcaggcaagcaaggtgccgttcggcaggctgaacgcgacggtgccgcagtccatacgaatgccggaggggccgtctgcacagcaggctgtgggaataccgaagttgacgaggttttccgtgacgccgccgaacgcgcctgcggtgcccgccgtgaccttcggagagttcatgccctcgccgcgcataaggcagatgaggtcttcgtcggaaagctgcgctacaaagtcttccagctccgctttgccgtcgaatacatcgccgagcttgatgcccttgtcgcccgtatatggctttgcaggctttaatgccgccgcgctgcgggccgccatatcgtattcgcgctgcggtgcaggctcgaatgcgatcgtgttattgtgattcaccatgcggtcaaacttcgtgaccggcgcgcacgcctgcacacacgtgcgggtgacggtatcttctttcacttcaaagctgccggagagctttgcgccgcgcacgcagccgcccgtgtagacgttatacgcgccgctttcaagcacatagcagaatctgtgtcccgtaacgccgctgtcgtcgtaggacgcaagatttgcgattgggaacgtgagcgtaagcgtttcgctttcgcccggctgcagggtttcggtctttgcgaatgcggcgaggcttcttgcggccttgccgagcttgccctgcggtgcttcaacgaaaacggtgacgacctctttgccctgcacgtcgccggtgtttttcacggtgactttctctgtaacagtctcgccgtcgaaatcgaagctttcaaccgtgcgggcaaaggtcgtgtagctgagaccgtagccgaacggatacagcacacagtcttttgcgaacgtctcaaagtagcggtagccgacatagatgtcttctttataaatgacccgtgtgggatcaccgaagccctctgtagacggataatcgctgatgtcgagcgcgatggtgtcgctcagcttgccgcacggcgtgacagtgcctgtgagaacatctgcagcgcctgcgccgccctcctgaccgccctgccagacgtacagcacagcggcgggatcgtattctttcacccacttcatatccatgatattgccgacgttcagcagaaccgcaacacgcttgaacgcgccgcaaacctcttttaacatctgatgctcggcggccgtcaagagatagctgccctctgcggcgctgttgtccttatcttcacccgcggtgcggccgatgatgacaacggcgatatcggactttgcagcagcctgctcggcaagctctttcgtgacgggcatttcctcctggcaccacggctcctgtgcccagcccatgcccttttcaaacggatggtccttcagccagtcacggtaggtctgctccagctcctcgttgacagaaatgtctttgttttcttttaaagcgtccagaatgttcgtgacgtagcgggtattaactgcgccgccggagcctgtgccgctcttataatagtcgaactgaattctgccgaacacggaaacacgctcaccctttcggattggcagcgccttgtcgtcatttttcagcagcacgcagccttccgccacagcctgacgcgccagcgcggcatactcgttccaatcgatcttatacggattgctcattttatttttcctttctgcatgatctatgtcgtttacggtgtattctctttgttataatgataaacgattttgtggattttatcaagccgcgcagttaagtttctgtaaaaaaatcacgtgaacgaaaattttcgttgtaaaacgctttaaaaacggttatgatacatataaatagaaaccctttacggaaggagttaccgttatgcctgctttttatacccattatcgctttggctgcgatgttttaaaacagctgccggaggacatccgcagcatttgcaccgcgcaccgcgggctttttgacattggcttacacggaccggacatctactttttctatcgacccgttctgccgaacaaggtgaaccgcatcggctatgcggcacacaagcgctccgggcgctactttttacagcgcgcacagaaggtcattgcgtctgcgcatgacaaagatgctgcccgcgcgtatttctacgggcttttgtgccactttacgctggattctatctgccacccgtacatccacacggcgatgaaagaattcaacgtcacgcacgcggcgacggagaccgctttcgaccgcgctttgttactcaaagacggcaaagacccacagcactttgacccgtgcggtcattttgaagtgaacacgcgcaacgccgccgtgatcacgcccttctacacgccggaagctactgtggcgctgaccgaaaagagtatctcttccatggtattctacggccgtgtgctgttcacgccgaacaaggcgctgcgccgcgccattgacaccgggctttacatcacgttccaccacgacgccattgccgatatgatgatgaccacgcaggacgtgccgagctgcaagctgtgcacggagcaccttatcgaactgtacggcaaagcactggagcttgcgaaaacgcttttcccggctgcgcaaaagctgctccaaaacgaaaaagtctcctgtccggagcttgaccgcacatttgatggctgatttcaaatttttaccaaaatgcccgccatgcaggaaccaaaacgttctgcacggcgggcattttatttcccgggttttaccctatagcaaaagctcccgttcacgaaagcctgtgaacgggagctttgattttcacttacaaatccgatcagatttccggctctaccagatggcaggcgcagaaatgaccaggacgaatttcacgcagctgcggcttcgactctctgcacttgtcgcaggcgaccgggcaacggccggcaaagttgcagcccttcggcgtgttgatcgggctcggcacgtcgccggaaagaatctggcggtgcttctgcgcttctgcactcgggtccggaatcggcactgcggaaagcagagccttggagtacggatgcagcgtgtgcgcatacagatcgtcggaagaagcgagctcaacgacattgccgaggtacataacggcgatacggtcgctgatgtacttgacgatgttgaggtcatgcgcaatgaagaggaacgtcagtccgagctgctgctgcaggtcgtgcagcaggttgatgatctgggactggatggaaacgtccagtgctgagatcggctcatcgcacacgatgaattccggctcgatagcgagcgcacgggcaatgccgatacgctggcgctgaccgccggagaactcatgcgggaagcggttggcgtgctctttgttcaggccgaccagctcgaggagctcgtacacgcgctcctgacggcgctttgcgtcgtacatgccgtggatgaccataccctcttcaatgatggaggaaacggtcatacgcggatccagagaagcgtacgggtcctggaaaatgatctgcgcttttttcgcatacttgaaacgcgttgcggcgtttttcagattcagctcttcgccggcatagtagagcttaccggacgttgcgggataaatgcccatggccacacggccgagcgtggacttgccgcagccggactcgccgacaaggccgagcgtttcgcctttataaatatcgagagaaatgtggtcgacggccttcagcataccgccggaaaccttaaagtgcttgcatacgtcgtccagaacgatcagtttttcattactgctcatccggctcacccctttctgctgcgctcgggcaatcgggatggagcagccagcatgctgcctcatggccctcgcccaccttgaataccggcggctgctcctcatgacaaatcttcatgcagtgggtgcagcgggcaccgaaaccgcagcccttcggcgggttcagcaaatccggcggtgtgccggggatggaaacaaggcgctgggtcttgttcatatccacggacggcaggctctttaacaatgcctgcgtgtacgggtgcgcattgcggtagaaaatatcctcgcaggtgccggtctctacaaccttacctgcatacatgaccgccacgcggtctgccatggacgccacgacaccgaggtcgtgcgtgatgaggataatcgcggtgctggtcttctctttgatctcggcgagcagatccataatctgcgcctgaatggtcacgtccagtgcggtggtcggctcatcggcaatgagaagcttcgggttgcaggaaagtgccattgcaatcatggcacgctgacgcatgccgccggagaattcgtgcggatactgctttgcacgctcttccgggttcggaatgttaacaagggagaggtacttaatggcttccgccttcgcctctgccttggaaagatgacggtggtgctgaatggcctcgacaatctgcttgccgacgggctttgtcgggttcaggcaagtcatcgggtcctggaagatcatggaaacttccttgccgcgaatcttctgcatttctttttcgttcgcggctacgatgtcgtgctcgccgagctgcacgctgccctctttaattcttgcgggcggcatggggttcagcttcatgatggtctgcgccgtgacgctcttgccgcagccggactcaccgacgatggcgagcacttcgccctcgctcagcgagaatgtgacgccgcggacagccttgacctcaccggcgtaggtatcgaaggaaacgtgcaggttctgcacatctaatactttattcatgttgaattacctcctcaagcgcgggtcaaatgcatcgcgcaggccgtcgcccaacaggttgaaggaaagcattgtaaggctgatggcaactgccggcacaacaagctggtacggatacgtcatgaacacatcttgaccgccctttgccagaacgccccaagacggctgcggaaccggaacaccgagaccgatgtaggaaaggaatgcctcggtgaaaatcgcgctcggaattgcgagggtgacgttgatgatgataacggaaagcgcattcggaatgaggtgctttgcaatgattctggagctctttgcgcccatggcttctgccgccacgatatattcctgactcttgagctggagcacctgaccacgcacaagacgtgccatgccggtccagccggtgatgccgtaggcgacgaccatggtgaagatgcccttcgggagcaccatcatcaaaaggataacgacgatgaggtacggaataccgttgacgatctccacgatacgcatcatgatggtatcaaccgcgccgccgatgtaaccggaaataccgccgtagatcaggccgacaatgaggttgacgaacacggctgcgaacgcgatcatcagagagacgcggccgccttcaaaggcgcgcaggaaaaggtcacgaccgaggttatcggtgccgaaatagtgtacatggtgctgtccctcataacgggggtctgtacaaactgtcatgaagcccttgttgacttcgccaaggtgctgttcgcggctctcaaacggagagaagaacggcacgatgatgcaggaaaggatgaggagcacgatgatgaagaaacacacaacggcaactttgtttttcatcagtctgccgatcgcgtctttccagaaggtcgtgctcgggcgggaaatgccctcgcggcgagcggagtcggaaccgatccactcaaaacggcttttatctatctgtgtcatactcagccctccaatttcacgcgcggatcaatgagaccatacgcaatatcgactacgaggttcgcaataataaggaacgcgccgtagaaaaccgtggtgccgcagatcatggtgtaatcgagaccctgaatgctctgcacgaaatacttgccgaggcccgggataccgaaaacgctttctacgacgaagccgccggtgaggatgcctgccgtgatcgggccgaggaccgtgacgaccggcatgatggcgttgcgcattgcatgcttaaagataatgccgctctgggaaaggccctttgccttagcggtcttgatgtaatcctgaccgagaacgtccagcatactggtacgcatcagacgggagatcgttgcgagagagccgaagccgagtgcgacaaccgggagaatgtggctgttgaagccttcccagccggtaatagcgaaaatacgcatgcccgttgccatatacagcttgaggccgaggaaatactgcaaaacagaggccacaacgaacgacggaacggaaacaccgagcagtgcaataatcatggcaactgtgtcggctgccttgccgcgcttgatggctgcgagtgtgccgaggagtacgccgccgatgaaggcgaagcaaatggaacggataccgacgtcaaacgaaatggcaaatgcttcggtgatcatcaatgtgaccgcacggttataggtaagggaaacgccaaggtcgccctgcacaacattaccgatataaatgaagaactgctgccatacgggcttatcaagaccgtatttcgcataaagcgctgccatctgtgccgcgggaagctgcttttcaccggtgaacgggtcgcccggaagaagctgcatcatgaagaatgtgatcgcgaccaacaggaacagggtaacaatggaatagcccacgcgctttaagatgtacttagtcatgtgcaatccacctctctttgatagtttaatagaatgattaaaggttatgcggacaaagccgccgacgtttttgggaacgatgccgccaaagcgtccgcggccttgtccgataaacgacaatatgacaatataacaaaaaatgtgcgcaaaagctcggaaattattctgccgcctttggcacatcaattttgtgaacttagcgaatgcagcttgtattgccgttcgcggaaatccccaaaatttcggggaaacaaggctttactcacccaacacagtgatgcgtatatcacctaaaagtgttgaagtaaaagattaaaagaataaatacagttcggtgcggcgcacccttttaagatgcaccgcaagccgtaaccgtatttgaatttcttttaagtatccgggtcagcgcccgtaaggttttcgattaggaaagctttacgtaaacagcgttgatatcctggaacgtagatctgtgcataccgcccttgatcttatcggagcaagcataggacggagctctccagaaggccgggccgatcgggagctgatccgcaatgatctgctcgcactcgatgaagtaagactcacgcttttcaaggtctgtctccttggctgcgaggtcgatgagctcatcgtatctctcgttggagaagccggtctggttgttgccgccatcggtgacccacatgtcaaggaaggtgttcgggtcgttgtagtccgggccccaaccggtgatggacatgacatagttgccggtcttacggttctgagaaccctgcttggtgatcatggagttaacggcaacctcgatgccgagaacctgtctccactgctcctgatagaaggaagcttctgcaatagacgtcggggagtcgccgcagtcgatggagaggtgagcggagagatcatctaccgtgcagccgagctcggagagagccgttgcaaggtattccttagctttttcctggtcacgggacggcgcatacagctcgccgaccttacctgcaaagggggtgccgtcagcagcggaaacaccgggcgccgtgaaggaagtcatcggctcgttatcgttctgccaaaccgtatcaatttccttctgcgcgtcaattgcattgaacagtgcacgacggagatttacattggagagatactggtcattgttgttgaagtaaatgtagaatgcggtaccatccgtataagactgaatcgtagcacctgctgctgtagcctgcttgatgagttcgccggtgccgagaccgaccatatccaggtcgcctgcgaggaaggaggagagagctgcgttggcatcggtgatgatcttccaatcgatctcttcaacttctacgtctgctgcgccgtgccatgcatcgtttttctgcataacgatcttatcgttgtggctccactcagtaagagcgaacgggccgttcgtgcagaagtactgcgcttcggtggagtagaggtctgcgcctacagcctcatagaatctctggttgatcggagcaagggtgccgaaggagaacaggaacagtgcgtacggagtcggctgctccatggtaacctcaagggtataatcatcgacaacctttacaccaacttcgtcccaagtaacttcaccgttgaagtacttttcagcgttcttgatgaagtagaggaagtaagcgtaatcagaagcaacatccgggttcaaagcctgactccaagcaaactcgaagtcattcgccgtaaccgggtcgccgtttgtccaaacgccgtccttacggaggtggaaggtgtaggtgagggtatcctcatcgtagtcccagctctcagctgcgcccggggctgtgttgtcgtcatcgtcgagggtgacgaggttttcatacatgtgcttgaacaaggcgaactcaatggagtatgtggaggtcagggtgttcaggcctgtcggctccatacctgcgttcaggctgatggtctttgcagcgtctacggtcttcggggtgaagattgccgtagcgtcaccggatgcagccggggtggaatctccggaggcggtggactcggtggattctgcgctgctttcagaagctgcgatgctctcggtagatgtcgtggagctggagctgttgccgccgcaccctgcgaatgcggaaacaaccaacgccgcggacagaaccagagctaaaaccttcttcagtttcatttcttgttcctcctaatgtgataggtgatagaattatgaaattttcgttcaaagaaaattcatattgcatacataatacagcataaagcgctaaatcgcaagtggcaaaactatggaaatcctgtcttaatttttgtgtatttttgtgaattatgactttgaggcatatacacaccgtgcagtttttcatgatagtattgcaattttgtaattaaatccacccaaaatccgccaaaaaaagccgcttcaggggcgtgtcctcaacaaaaatacaagtttccgcgtattgtgcacgaacgacggatagaaaccgaattcctgcattttacggcgaaatccgacaagttttctcctgtttttgaaagaaaacgcgcaaaaatgcagtttacccggaaaatatgttggacattttcgaagttttgtccacctgcctctcccctatgtgcgctgttttctatgcgttttttgctgcaaagccatcctacatataatagtatacgatattccaatatcgatatagaatacggatttttgctttagtttgcatcagatgtccttcactatgcatgcttaccggtttttgtgcaactgcggaaaacaaaacggaacctcttcgccgtgcagacgaagaggttccgtaatgcaaatttaaaatcagccgtggatggagtagttcggggcttccttcgtaatctgaatgtcgtgcggatggctttccttcaaacccgcacccgtaatgcgcacgaactgtgccttctcgtgcatttccgggatatttgcgcagcccacataacccatgccggagcgcagaccgccgaccatctgataaatggtatctgcgagcggtcccttataaggcacacggccctcgacgccttccggaacgtacttcttgttgtttgcctggaagtagcggtcgctggagcccttacccatagcgcccagagagcccatgccgcggtagaccttgaactgtctgccctgatagagctcgtactcgcccggggtctccttgcagcctgcaacaagggagccgagcataacaacgcttgcacctgctgcgagcgccttgacgatatcaccgctgtacttgatgccgccgtctgcgataaccggaacgccgtattctgccgccgcgcatgctgcgtcatacacggccgtgacctgcggcacgccgatgccggcaaccacacgggtggtgcagatggagcccgggccgatgccgatctttacgcagtctgcgccggcttcgataagcgcacgggtgccctctgccgttgcaacgttacccgcaatgagttgaaggtccgggtatgctttcttgacctttttcactgcttcgatgatgccgctgttgtgaccgtgtgcagaatcgagcacgacaacgtcgacctgtgcttccacaagggcagcaacgcggtccagaacgtcagccgtagcaccgatagccgcgccgcagagcagacggccgccgtcgtctcttgcagagttcgggtactgcacagctttttcaatatctttaatcgtgatgaggcccttcagataacccttttcatcgacaatcggaagcttttcgattctgtggtggcgcaggatctcctgtgcatccttgagggtggtaccgaccggtgcggtgacgaggtgatccttcgtcatgacgttttcgattttctggtcgaaatcggagccggacatgaagcgcaggtcgcggttcgtgatgatgccgacgagcttgccgttttcgcagatcggcacgccggagatcttgtagcggcccatgaggttatccgcctcgcgcacggtgttctccggcgcaaggaagaacggatcaacgataacgccgttctcggagcgcttgaccatatcgacctgatcggcctgacgctcaatggacatgttcttgtgaatgatgccgatgccgccctcacgcgcaatggcaatggccatgtccgcttccgtgacggtatccatagccgccgtcataatgggggtgttcagcttaatcttctttgtgagatgagtggaaatgtctacctgactgggcagtacgtgtgattctgccgggatcagaagaacgtcgtcaaaggtgagcccctctttgacaaacttagaggtgaattctgtgttcagcataccgtcaaccatcctttcgccttgtgcaccgtgttttgttgtctttatgcggtaatttccgcataccgcataggaaaaatttcccggcaagccgggaaaaatatattatttgatattagattgtaccactttcgcggtacattttcaactgttttgtcctcgaaaaaacagagatacccgctgagcgttctatgcgctttttagggaaaaaccacaaaaagcggttttatgtggctaacttccgggtttcgggacgatttttgcaggattttgacggactgaacttctaaaaagcactccatttgtaaaaaacttcatacagaaatcacaaaatatcttgacactccgctccgtttgatataccctaaaactactatatcaaaagcatatctcccgtacccgacatattcggcgcacggcacattttccgcgcttcccctattacactcgaccctattgggctaaaaggatggtttttcatgaacaagcttcgcagattgcgctccctctccccggagatggcggaaacgctgcgccttgccggcgtgcagggcattttttgggcggccatggcggtaggcaattatcaaacagtctacctgcaaagcatcggctttcccgctacggatttcggcttattaaacgccattgcctgtgccgtcgctatttttgccatgacgttttggggcacggtgagcgaccgtatcggcagcgtgcgcaaaattgtcattttaacgctgacgctcggctgcggccttttcatttttgtgccactcattccgacggggcaatcctactcgactctgttatttctaatcttgatcccgatcatcaactttttccgcgtaccgatgtcgccgtttgtcgataaccttacggtgcgcaactgtgcggagcatcgactgaattacggcatgatacgcagcagcggctcgcttttatttgccattgccggtgttatcacggtaaacgcgctcattcctgcggcgggtgtgccttcgacattctgggtgatgggcattgtgatgattcccgccattgtactgacgtatttctgctttgagccgcagagcggcaagcgtgtgaaaaagagcgcagcgggtgccggcgtactgctgaaaaactacgcatacatggcgtttctcatttttgcattcttcttccagatggccgcggcgtttgaagggaactttctgacgtattacatggcggatattcagattgatactgtcaatcttgggctcattctctccgtgcgcgctatgatggaaatcccgtttctgttcttcatcggccacctgcgccgctatatcaagatgaaatacctcatcatgctttctgcaattttgatggcgacggagtgtctgtgcttctgcttccttgtgaattcgctgccaactatgttggtatttgccgcgttttacggccttggcaacggtgcatttctcggcacgggcacgaactatatctatgagcttgcacccgtggagctgcgtgccacggcgcacagcctgttcatttccgtggcgcaaatctccggcattctcggcaacctgctcggcggcgttctgtttgacaccatcggcggcaaagcgttctatggcgtaacagcctgcgtattcctcgtttccgttgcaatcttcgccgcaagctttctcttccaccgcaataaaaaagaaacggctgcggcataaccttcaaatactctgtgctcttaaaggctcgcttcggcaggccttttgttttgtctgagaacacacgccttttattgtatatgccgaaatgacgtttccaacccattttacgctgctttttagcgtacccgcacgcaacatgtcgtaaaaatgaatgcgtaaagtatattgcctttccatatatagccgataccttgtgaaaagctttgctttctccactataccgtgtgcttttccacactttccaccgagttttccacaccataattttgcagaattatgtatatttatacataacttcgttctgcgattgtgtaggtatttgttctcgtatcgtggacacagctgcgtatatctgtcgaaatttgtccgcaaccggagatacatacgttcgaaaccgctgaatattctttcactcatttaagttgaaaatcggttttccacatatcctcagaaaaagttttgcacaagacgatgacgaaaactgttgccttttaaaagttcgtgttctttcgttccgctttgcatcatttctcctattttttaatacggtcatccgagcaagtctttctataagcagacgacaaaagaggcacacgcattttactttgcatgtgcctcttttatcacctatttaatttgcaaaaatcactttttcgggacgataacttccttgccgcccatgtacggacgcagagcttccgggatgcgaacgctgccgtctgcctggaggttgttctcaaggaatgcgatgagcatacgcggcggtgcaacaacggtgttgttcagcgtgtgggcaaggtacttgccgttttcgccgtttacgcggatgcgcaggcggcgcgcctgtgcgtcaccgaggttggagcagctgccgacctcaaagtacttcttctggcgcggggaccacgcttcaacgtccacagacttaaccttcaggtctgcgaggtcgccggagcagcactcgagcgtgcggaccgggatatccatgctgcggaacaggtctacggtgttcttccagagcttatcataccacttcatggagtcttccggcttgcagacaacaatcatttcctgcttttcaaactggtgaatacggtaaacgccgcgctcctcgatgccgtgtgcacctttttccttacggaagcacggagaatagctggtcagcgtgagcggcagttcggcttccggcaggatctggtcgatgaatttaccgatcatggagtgctcgctggtaccgacgagatacagatcttcaccctcgatcttgtacatcatggaatccatttccgcaaaactcataacgccggtaacgacgtcgctgcgaatcatatacggcgggatgacatacgtgaagccgcggtcaatcataaaatcgcgcgcatacgcgataacggcagagtgcagacgcgcgatgtcgcccatcagataatagaagccgttacccgcaacgcggcgtgcagcgtccagatcgatgccgtcgaagctttccatgatctccgtgtggtacggaaccgggaaatccggcacgaccggctcgccgaaacgctcaacctcgacgttttcgctgtcgtctttgccgaccggcacgctggcgtcgatgatattcgggatcgtcatcatgatcttgaggatcttctcgtcgagctccttttccttcgcttctgcagcgatgagctcatcggactgtgccttgacctgtgccttgacctcctcagcctcggccttcttaccctgacccatcagtgcaccgatctgcttggagagcttatttctggaagcgcgcaggctgtcggccttctgctgcgtagcgcgtttttcggcgtccagctcgatgacttcatcgacgagcggaagctttgcgtcttggaactttttcttgatattctcgcggacaatgtccggattttctctcaaaaacttaatatcgatcatttttgaacattcctttcggttatttgtggctttttaagcgtttttcttggttcttgggctggtttcgcatcgtgaaactccaataggcaaaaaagtatttcgagctccgcggagctcgaccaaagggtttacccttggaacccacagccttttgaaaaagtctggtgaaaactttatttgccccgttcactttagctttgtgatttactcacccgttttatcggtcaatttcaaatcatacagcaggttcttgaggtcttcctcaccataaaactcgattgtcagcgccgcttttttctttgtgccggagatatgcaccacacggtttaaaacgtcacgaagtgcaagctcggcctcgtcatagtagcggatgcggcgctttgcgggtttatctgccttttccggcttctcctcgtttgcgcgctttgccattttttccagctcgcgcacggagatgccctccatggtcacgcgtcttgccgccgctttcatctggtcttcatttttgaagctcagtagcgttctggcatggcccgcagtcatttcgccgcgctccagcatgttctgcatatcctccggcagattcaaaagccgcagtgcattcgtgatcgccgggcgggatttgcccactgtttttgcaatctcctcctgcgtgaactcgaagttatccatcagcatcttgtagccgtttgcttcttccagcggcttcaaatcctcacgctgcaagttctcaatcagcgccagctgcatcacttcgctgtccgtcaggtcgcggataaccgccggtacggtcgtcagccctgccatgcgagaagcacgccagcgtcgttcacccgcaacgatctgatagccgccggaaagcagtgggcgcaccaagattggttgcaaaacgccgtgctgcgcaatagaatccgccagctcggtcatcgcgccgtcatcaaagctctggcgcggctgcgtacggttcggctctaagtcgtttatgccgagctccaccgcgccggcatcgtcctcacgcgcattgtcatagaaaattgcgtccagccccttgccgaggcctcctttttttgccattgcgaaagaccatctccttcttgtcgcattcataccgataccacacgattttgcgcatgaaaccggttttgccgccgaaatcagcggtttttcttcaaaatttcatccacaagcgcaccgtatgcgatgcagcccttgttggatttatcgtagtacaagatcggctgtccgtagctcggcgcctcggaaaggcgcactgtgcgcggaatgactgttgcaaacaccttgcgcgggaaatactttttaatttccgtcacaacctgctgcgtcaggttcagtctgccgtcatacatcgtcagcaaaacaccttccagctctaaacggtcgttgtaacggcgcttcacagcctgcacggagctcatcagctgcgaaaggccctccaacgcgtagtattcgcactgtaccgggatcaaaacagagtccgaagcattcagcgcgttcgttgtgataagccccagcgacggcgggcaatcgatgatgatatagtcaaattctgtgcgcagtggcgccaaagccttctttaaaacggactcgcgcccattcaaatctgcaagctcaatctctgccgcagccagatcggccttggaagggatgacagaaagcttttcaaattttgtttcgagaacggcatcttcgccctttgccccgttgatgagaatatcatacgaggtcgttttcagcgttcgacgatcaaaacctacgccgctcgtggagttgccctgcgggtcaatatcgaccaaaagcgtctttttcccttttgcgccgagccatgcggcaatatttactgcgctggtcgtcttgcccacgccgcctttttggttcgccacggcaattaccttgctcatgtaccgcgcccctttccttcttctttctattatataggatattgtagcacatatccggcacagaataaagagaaaagttcatttttttgcaatgtttcatgtgaaacagccggattttatcgcgttttggcaaattttgatgtttcatgtgaaacatttgcagttttaaaccgaaaaaagcattaaaaacacagaaggactgccggcatttgcagacaatccttctgtgttgtgggaaatgaataagggaatgggtttacctcgtactcaagattaagttctggcgcatcagcttgccttgtgtgcagctgattttgggatgcggacgacgcattcgtaatactcatccgtttccttacgctgaaaagccgcgccgatgccggcctctttcatggtttggacagcatggtcgatcgtgttgaggaacaggcgaacatctttcgcaatgaatgtcctcttcggccttttcgcctgtccctcctgctccaaaagtgatttgatatacgtatccgtctgcgccacgttcattttgcgcgctatgacagccttcaacgctgccatgcgcttttccggatcttccattctaagcaaagcgcgcgcgtgacgctccgtaaggtggttttccagcaccatgcgctgctcttcgccggaaagccgcagcaaacggatcttatttgcaagcgacggctggctcatgccgagccgacgtgcggtctcctcctgcgtcatagagcggtcctgcatcaaagcatagattgcagcagcttcctcaaagaagttcaggtcactgcgctgcatattttcaataagcgccaacaccgcgccgtcctgcggagaaagctcctgcacaatggccgggatggttttgagccccgccatacgcgaagcacgccagcggcgctcccctgccaccaaaatgtagcggtcgcggtctctgcgcacaagaatcggctgcaaaacgccgttttgacgaatgctttctgcgagctgcaaaagctcatcctgcggaaaatccaatcgcggctgtgcaggatttggcacaatcttatccggtgaaagctctaaaagctttttcttttccgtaaatgccatacgccgcacctcctgcttgcatttccagtgtaagaagttgtcctttgtgagggcttgttctctttacaggaaatagcttaccacaatgaaaaggcagattttgccgcaatctgtcaccgtacaaaaagtttttcttgctttttcaaaacgcggtgctataataatagaaatattcaaacggaaaagcgtcgaaaaagcgcatattcccgccatttttagagaaaaggagcgaaagaacatgatctatgcagaaaccgaaatcaagctgaaaaacgggtgcactgccgtcgtacgtaatgcgcgccccgaagatgccaagcaaatgattgaatacctgcgcaccgtttcgggcgaatctccgtttttattgcgtgagccggatgaggtgaatttcaccgtcgaaaaagaacgttcaattttgcaaaacaaagcgggaagtccaaacgagatcatgctcaccgcttatgtgaacggcgagcttgccggaaactgttcgctggcgtcgcaaggtgataaacgccgcacaaagcaccgctgctgtgtttccattgcgttatatgaaaagtattgcaaccttggacttgggcgtatattattaaacacacttttggagcttgcaaagcaatgcggatacacacaagtggagttgggtgtgattgaaggcaacgagcgtgcaaagcatgtttacgaaagcctcggatttaaagaatacggctttttaccaaattctctgcgctattccgacggcacaacgcgcggcgaacacttcatggtgaaagagttataagttccacgtgaaacaaaaagggcagctatgcgaattacctctgcatagctgcccttaaattttgagtgcttttacaaatactttttaaagcccttcacttcactgtagccgatggcgtcatagaatttatgcgcgccggtacgctgcaggccggagaccaaaatgcagtagtggcactctttctctctgccccacgtctcaatggcttcaaacatgccgcgtccaatgccttttccgcggtacttttcgtccgtaacaacattttcaacgagtaaaatcggcttgcaggtatcgcagatatcttcaaatacaacaccaatcaaagagccacaaaggtcgccgttttccgtattttcagctacaagcaagtagttatcctcgttttttgcgatttttttcatcttttccgccattttctgcggatctgccatcgcatcggaaagctgcgccaaaagcgggttcagcttcggaatgtcgttcaattcggctttacggtaaataatactcattttgcttcccctttctgctctaaaaataacggttttttggtgatcgtgccgccgtgacgcggatacattttcggtgtaaagcgcagtttgcgcattacggcaacaaagcgctcgctctgttcctcatctggcagaatgaaaggaaccgtttttacaacatcgcatccaagcgaagagattgcttttcgggcatattccagttcatccggcaagctcggacctttcatcgcggcaaaatagcccttcattttgatgagcggaatgcaatattccgccaaaatattcatgtttgcgaccgcacgagccgttgcaacatcaaagctttcacgtagcttagtatcttttccggcttcttctgcgcgtttatgaatcgtctcggcttcaatgccaatggcatcacacacttcgcgcagaaaaacaagccgcttattcaaagaatccagcaacgtcagttcaatgtccgggcgcatgatcttgagcggaatgccgggaaagcccgcaccggtgcctacgtcgataactttcgcattctttttaatttcaagcgctttcagcagcgtcaagctatccacaaaatgttttatgactgcctcttccgggtcggtgatggccgtgaggttcatcacggtgttgcgctccaaaagcagatcaagatagatctggaactgctccgcctgtgcaggcgaaacctttacgccaatctcttttgcttttgaaatcagcagatttttaatatccataatcaaaatttcagcccgcctaaagcaaagctgccctttcagttttgttttataaatattatagtaatcaagttcaatttatcacatattaaatgtagcgaacatcacttatcctcattgtgtgcagagagccaaatcaacagcacggaaatatccgccggggaaacgccggaaatacgccctgcctgtcccacgttttccgggcgcacgcgattgagtttttcctgtgcctcaagtcgcagacccgaaatttcggcgtagttgatttcttttggcagcagcttcttttccaaccggcgcatttcggcaatgtcctgcagctggcgcttgatgtagccctcatacttaagcgccgtctccacgctttcaaaaatctcacgcgggtaattcgggcgttcggtgtcgataggtgtcaggtccgcataggtcacctgcgggcggcgcagcagctcagaaaggcgcacacccgtcgtgaccggcgatgtttcacatgaaaccagcacttcgttcagcgcgtccgtcggcgaaaacaccgttttctccgcgcgcttcatctccgcttctttctgcgcctgcttcttttcaaacttcgcccaacggcggtcatcgatgagccccagctcgcggccgattggcgtcagtcgctcatcggcattatcctgccgaagcacaagacggtattcggagcgcgaggtcatcatgcggtacggatcggtgacgcctttcgtgatgaggtcgtcgatgagcgtgccgatgtacgagcccgcgcgatctaaaataagcgggtcacgatttaagactttcagcgcagcatttgcacctgccacaaagccctgcgcggcggcttcttcatagccggaactgccgttgaactgccccgcgccgtaaagtcccggataatcgcgaaattccagcgtggcgttcagctgcaacgggtcgcagcaatcatattcgatcgcatacgcgtttcgcatgatttctacgtgctcaagccccttgatcgtgcggtaaaacgcaatctgcacttcttccggcagtgaagagctcataccctgcaagtacatctcctcggtttccgcgccgcacggttcaataaaaagctgatggcgcggcttttcggaaaagcgcataatcttatcttcaatgctcgggcagtagcgcgggccaacgccttcgatcatgcccgcatacagcggcgaacggtgaatattatcgagaatgacctgcttcgtgcggtcgtttgtccagctcacgtagcacacagccgagtttttcggcggcatttccgcatcaaatgagaacggcgtgacaggttcatcgcccttttgaacctcgaggtcggtaaaatcgatggatgagcgcagcacgcgcgccggagtaccggttttaaagcggcgcaacgaaatgccaagctcttttaaagaacccgcaagttccgtcgccgggaacatgccgtccgggccgcccgcatacgaaacctcacccacgaagatgcgcccgccgagaaatgtgccggtcgccagcacgaccgcgcggcacgtgtaaaccgcgccgaggcgtgtcgtcagcagccagttttcgccgtctcgctcaatgtcgatgacctccgcctggcgcatcacgaggttttcgcactgctcaagcttatgcttcatcacgcgcgcgtacttgttgcggtcaatctgcgcgcgcagcgagtgcaccgcagggcctttaccaaggttcagcatgcggctttgcagcgtacattcgtccgccgttttacccatttcgccgccgagcgcgtccacttcgcgcacaaggtggccctttgctgtgccgccgatgctcgggttgcacgggcagttgcccacagcgtccatatttattgtgaagatcaccgtgcggcagccgagacgcgccgaggccaaagccgcctcaattcccgcgtgtcccgcgccgatcacggcaacatcgtattttcctgcatcatagctcataatttaacttcttttccgatttattctgaaatacagcttattttaaagataaaatataacaattctgatatcttattttcccacgcagaacttttcaaatacctgatcgaccaccgcatctgaaacacgctctccggtcagttcattcaaagctgcaatggcaccctccagcgagaccgtcaccgcgtcccacgtcatgcccataagcaaagcgttttccgcttcctccaacgccgtgagcgctttttgtacgtccgcgcgttggcgctccgtatagagaatgccgtcgttcgggttcagctcagcggttttcagtgcgcgcgcggccgcgttttgcagcgcaggcagtccctcgccggaaagcgccgagaccgtcacgatctctttgaaatgcttatcgatctccgcacggtcgatcttcggcgtgaggtcggatttattgatgaccgccacggccggtgtatcgcctatggcgtccatcaacgcgcgatcgtcgtcgttcagctcttcgctcgcatcaaacaccgccagcacaaactgtgccgttttgacgcgatctaaagccatgcgcacgccaatctgctccacgcggtcttccgtatcgcgaatgccggcggtgtcggcaagacgcagcggaatttcaccgagcagcacagtctcctccaccacatcacgcgtcgtgcccgcaagatcggtcacaatggaacgctcgcaacccgcaagcaggttcatcagcgtggatttgccggcgttcgggcggcctgcaatgaccgtcaccacaccctcgcgcagaatgcgaccgccgtcaaagccggcgagcaaatctttcagcgccgtttttccggcggcaaggcgcgttttcagcatcgtctcatccacctgtggaatgtcgtcgtccgggtaatccgcccatgcggcaaggtgcgcaccgatgtccgtcagatccgaacgcagtttttcaatgcggcgggaaagtgcgccgtcgtgtcccgcctgcgccgctttcatcgcttcgcgcccttgcgcggagatgatctgcatgacggcttccgcctgcgcaaggtccattttgccgtttaaaaacgcgcggcgcgtaaattcgcccggcgccgcagagaccgcaccggcagcaaaaaccgcctgcaaaaccgcttttaaaacgaataatccgccgtggcaggaaagctccaccacgtcttcacccgtaaagctgtgcggtgcggcaaaaacggtcgcaacgcactcatcgaggcgctcgccgtccggcgcatacacgtgtccgaagcggcacgtgtaacccgccatatcacaaagcttcgcgccggaaaccgacttaaaaacacggtcgccgaccgcgcgggcctcatcgcccgaaatgcgaatgactccgatgccgcccggcgccgccgccgtagagattgctgcaatggtcttcatagtttatcccttcttctcgttcgctgcacatgcaacactttctcattttgtattataccacgcggcgaaaagattgtcacgcagaatgtcggaaaacgcaggaaaatcacagagaaaaagcgcctcctttatccgttcggagacgcttccttttcatttttatgccgttcttattccgtgaaagctcgctatgaacggattacagcgcgcttttaagcgcaaaaaactccgcatacgcaaagtatacggagtttctctgttttaaagttttagtttttggagatcttaccgtaaggcgtagaaacgtcgtccagaacacgcggtgctgcgggagcagtgcggttctgtgccggacggctgtcacgattatctctgcgcggagcgcggccaccgcgattatcgcggttatagccgccgtttctgccgcggttattgccgccgcgacgattatcacgctttacgtagcgctcgccgccctcagggccgatcacaacgtggcgggcaaggtcttcgccctcgctccaggacttcgcaccctcaacctcctgcacagcggtgtggatgatacggcgctcatacggattcatcggctccaaggaggcattgcgaccggtctttacggcgcgggcagccatctttctgccgagattttcaagcgtttccttgcgcttttcgcggtaattgcccacgtccagcgtaatacggtaataagactcgtccacatggtttgcaacgagagacgcaagatactggagggaatccagcgtttcgccgcggtggccgatgatgaagccgatgttttcgccggtgagcacaagctctgcgcctgcctcttcctcgcggatttcaatatttacgtcgccgaggcccatgccggaaagaacgttgcgcagatactctgcagcggcgtctgccggtgtggaacggatgaacgcgcgcacctttgccggtctgccgccgaaaaggccgaaacgctttttctcttccgtttcaagaacttcaaactctgcgtctgcggggtctacgcccagcattgcgcatgctttttcatacgcttcttctgtggttgcgcctgttgcgattgcttcttttaccatggctttcttcttcctttcttcttttcaatactctatctttatcccgtttcggagtgaaaggaggtggggataacagcctttatttatttcttgcttccgagataatcggtagaattgcctttgtttttctgcgcatttccgccttttttaccggtcgctttcttttccttctgcgcagcctggcgctctgcctgcgcctggttcttcgcctcaatcttatcggcgatctgcttttgcaggtttgcgggcagcggctttaccttccgatccgcctgtaaaagcgtcacatagcggctcgcttccgactttgcggagacctgctctggcgaaaaatacttgtgcgtgatgagcgtctgtgcaaaaccgaccagcgcggaaataatccaatagaaaccgacagctgccggcatgatgtatgcccagtatgcggacagaagcggcatgccgtacatcatgaccttcatgcagccctgacctgcgccctgctgctgtgtgggctgcagcttctgcatgacaaaggactggccccagtaggtcacaagtgccagcaccgggatgatccacagcatagaagcgaacgagctcgtgttcggggacgcgagcaggtcaaggccgaagcacttgaatcccttaccaaaaaactcaatcttctgcacatcgtccgcggagaacatcgtcagatggtccttcagtgcgtcgaaattcttaacgatctcaagctctacatactgattcgtgctcgcgatgcccggaatcttagaaacgaattccgtagcctgcgaaatggtgtcctttgcaatatgcagagtgttcgagagcggataaataacggagtaataaatgccgagcatgatcgggaacggaagcagcgtcgtcagacagccgccgccgggattcacaccctctttttcgtagagcttctgcaactcttcgttatacttcatctggtccttggcgtacttcttctgcagctcctgctgcttgcttgccaatctggactgcgccgccatgctcttctgcgatttaatcgagaacgggaacatcagcgcctttacgatgatcgtgaacaggatgatcgcgataccgtagtttttgaaaacggtgtacaggaaccacagcagataaccgagtacgctgccgaagaaattaaaaatagacatcatagtagttgaccaaatccttcccggatcaaaacttattcttttttccgcttttccggcacagggtcatagccaccgcgggaaaacggattacaccgcagaatgcgccaaagcgcaagcacgccgccgagtaaggcgccataccgctccacggcttcttccccgtactgtgagcaggtggggatatacttgcagcagccgcgcgttgcacgcggtctcagcttccgatagagatggatgagcccaatgacggcgcggcgcggccaataccgcacaccctttttcgccgaaatgcgtccgcctttatattgtatcacagcagacacaggctctttctgttttctcatactgcttttctgatctgtcgttatgacaattcttctttcgttacacttgcggtttcttcgcccgtctccgacgtcctttcggagtcattttccgccgtttttgcggagctatttttatctttgggtagggcaacaagcacgccgagttcctcaagcgcgctttttaactgcgaagatacgatttgatagtttgcgaacggcgttctgccgcggctgacgaggacaaagtcataccccggcttcagctgcgggtacagcgcacggatgctttcacgcagaaggcgccgcgcacggttccgcttgaccgcgttgccgatctttttgctggccgtaatgcccacgcgcgcctgcttcacctttttattgcgcaggcaatacagcacaagcaccgggcgcaccgcgctttttccgcgggcgtaaacgcgcttatactcgtggttttcggtcagcggcacaaggatgtccatgggtaagcctccaaagccgttcggtaaggccaaagctgcgtatagcagagccttgccgccggaaaaatcaggcaaaacaaagaaaggtcacgcagcggtgaccctcaaagcatacattaataggttaaacgtgctctgccctttgctctgcgacgcgccagaactttacgtccgttgcgtgtagacattctctttctgaagccgtgctccttctttctgtggagcttcttcggctgataggttctcagcatatcaaaaaccctcctttcacgaggttacttatcaaaatgcggtctgcaaataacagtccgttacagataagcattataccttaaaaccgtagaagctgtcaaccttttttcgggtttttacggaaaaaaacttggaatgaagcgctgcaaaggcaaaagcaaaggaaaatagaaggcctacatgtttttttcagcctgaaaaaacacaaagcaaagtgcgcaatgctaaatgtttttaatcaatcttttttcaagaaaggttataggagctcggggcaaagtttcccattcctgcgttaaaaatccgccttcgcgctccctttttccaccctttctgcatataaattgccgaaaacacgtttctttcccgctttttgcctgtgaagtccgtcagatttttcaacattccacaggttttctgtggacaactttgcggttttgtgctacactatatattagtattttagcgtcaaaatgcactttcaatgccgcttcttcgatcatcatgaccgctgcggtgcggctatgggcgcataccgataccaaaacctaaaagaaagggaataaggaaatggaatcattcttagaagcatgggacctcatttgcgactactgcaaaaagcaggtcaccgacgtgagctatgaaacctggttcagcaagctcgtccccatctcgctcgatttcggagcaggcgttgcaatcattcaagcgccaaacgaatttaacaaatccaccatcgagcgcggctttcacaagtgcttgaacgacgccgtacagagcgttttcggcgaagctttcacctataagctcatcactccgatggagaaaaaagaaaaagagcgcgtaccggacgatgacgaatacgagtacacgtttgaaacgttcatcgagggcagctctaataaatttgcctgcgcagcctgccgctatgttgcaaaagagccggccaaaaactacaatcccctctttatctacggcaactccggcctcggcaaaacgcacctgctcaacgccatcggtcacgagctcaaaaagaatttcccggataaggatatcatttacgtcaagggcgaccagtttgcaaacgagctgatcgaggccatccgcgccggtaccaccgtgagtttccgcgaaaagtaccgcaaggccgacgcactcctcatcgacgatattcagttcatcgccggcaaggaatccacgcaggaagagttcttccacacgttcaatacattatacgaatccaaaaagcagatcgttttaacgagcgaccgtcccccgcgcgacatcgctaccttggaagatcgtttgaaaacccgctttgaatggggccttaccgccgatgtgcagccgccggactttgagacccgcatggcaatcatcaagcgcaaagccgagcttgtcggtctcagtgtgccggacaacgtctgcgaatttatcgcacagaagctcaagagcaacatccgccagctggaaggcacggtcaaaaagctcaacgccatccatcttgtggaaggcgccacccccactatcagtacggcacagcgcgccatcagcgacatcgtaaacaacgagcagcctgcgcctgtcaccgtcagcaaaatcattgaagaagtcggccgcacctacggcgtttccccggaagatatcaagtcctccaagcgcaacgcaaatgtctcctttgcacgtcagatttccatgtacgtcgtgcgcgagattacacagatgcctatggtcgagatcggcaaggaattcggcggcagagaccactccaccgtcgtttacgccatccagcaaatcgaagaaaaatccgcgcgcgatcccgtgacgaaggccaccgtcagcgacatcatcaaaaatattcgcgaccgctgatcttctttcacccctaaagtgctccatttcccttattctttcctatatactggaatacaggcaaattcgccgcacttttaaaaatatcaaatacagaacattccttataacgttctgtataattgtcgcagaactccttgtggacgactttgaggttcaaccacaagatatagggctcgatcgctgatgtccttacacgcgaaagccaaaataaaatcaacgagttttcaacatttcacacagagttttcaactgctctgtggacgaaatcaaattttccacactctccacaatccctccacatccattttcgcaaaactttcgcgcaattttcacctgtccaaagccactttttagagtttccaactttttcacaccctctacgactactgctataactaatacttaaaataaatataaaaaaggaccgcaagcttactccttccacatctccgcacccaaaaacacatagaaatgtgaaaaaccaaaatgcgcggtaaaactttcgcggtccaaaatgctaaacaaaagaccaaaaccaaaaaaccgcgcagaaaggaagaacttatccacatgaaattcaccgtagaaaaaagattgttgaacgaagccgtaaccaatctgcaaagagcggttccctctaaaacttccattccggcgctcgaaggcatcctcatccgcagcgaagaaaaccgcctcattttgaccgcttacgatcttgaaatcggcatgcaaaccgagctgcccgccatcatttccgcgccgggcgcgatcatcctcaccgcaaagctgttcgccgaaatcgtccgccgttcgccggacgaggacatcaccattgacgtggacgaccgcaacaccgccaccatcacctccggcgtgagctgctttaccatcatcggtatggattcggcagaattcccggagctgccgaaaatcaccgacgccgatacaatcaaaatgccgcaggaactcttaaaaagtatgattcgccagacgcttttcgccgtcgcggacagcaccgcaaagccgatccatcagggcagtttgttcaaaattgaaaacggaaatttagatgttgtatcggtcgacggttaccggttggccctgcgccgcgaggcgattaactacgcgaacaacaccgaatttgtcgttcctgggaagacactttccgaagtactcaagctcttaaaggacagcgagggcgaagtggagatttgtccgagccgccgccacattttgttccgcatcgataattatacggttatttccgctttgctcgagggcgaattcctcgattataaatcagcactgccgaaggataaaaaaaccgaagttacggtttccactcgcacgatgatcgaaagtgtcgagcgcgtttcgcttctcatcaccgaccgtctgaaaagcccggtgcgctgcgtaatcggcgaagacaccgtcaagcttttctgcaccaccaccatgggccgtgccaccgaccagatttcggcggaaatttccggagaccagcttgaaatcggtttcaataacaaatatttactcgatgcactccgcgcggcggagaccgacgaagttcggctgcagctcggcggcccgatcagcccgatgctcgttctgccgaaggagggcgatgcgttttcgttcctcgtcctgccggtgcggctgcgcagcgaaatgtgatcaatgtttcacacactgtctgctgctcgcggacaaatgttacgacttttgtgaaacattaacttgtgaagttttggtgccaaaacttaaagtataaatttcatgcagctttaatgtgcgaataaacgtgaagatttgtacattaaatttatctttattttataagggatcgaatatattatttttataagggatcgaatatattatgaaaaatgagattatcacgatcacaacggagttcatccgtctggatgcacttttaaagctcggcggcgcgttggataccggcgggcaggccaaattcgtcattcaaaacggcgaagtcgaagtaaatggcgaagtctgcaccatgcgtggcaaaaaaatgcgtgacggcgactatgccgaatataacggcggccgctatacggtaaaagtggaggaatgagccggtgaacgtactgcgcctcggctttgaaaatttccgaaatttgtgcccgggcgaaatttttccgggcgagaccatcaatgtcattcacggcagcaatgcccagggcaaaacgaatttgcttgaggccatctggctttttacaggcggacattcgtttcgcggcacaaaagacagcgaactgccggttttaaaagacggcaaaaatgcgcctgcggcctcactttccatgacgctgtttacagaaggacgcgagcaggagctaaggctcgaactgcgcgacggtcggcgctccagtgtcatcaacggcgtggagaaaaagaccggctcggcgcttgtgggcaagttctgcgccgtcattttttcgccggagcatcttttgctcgtcaaagaaggcccttcgcgccgccgcgcgtttttagacggtgcgttgtgccagtcccgcccggcatttacgcgcgttttggcgcattataataaagctctcatgcagcgcaatgcgcttttaaaggatattccgcgccacccggagcttatcgatacgcttgatgtttgggacgagcgccttattctgttcggcacggaggtcgtacaggagcgcgctgcgttctgcaaagatctggagccgcgtgcggcggaaatttaccggggtatcgcgaaaaacagggaggaaatcatgctttcctacgcgccgtttggcggtgcggagacaaaaacggagattgccgagcggttttccgaagcgctgaaaaacgccagaaatgccgatgctcgcgcggggtttacgtccgtcggcccgcacagagatgatttaacgctcaccatagacgggctttccgccagaacgttcggttcgcaggggcagcagcgcagcatcgtgctggcattaaagcttgcggaagccgatattctgtaccgaaaaaccggcgagcgcccggttatcttactcgacgacgtgatgagtgagcttgatatgagccgccgcgattatcttttgaatcaccttgacgggcggcaggtgttcatcacgtgctgcgacccggaaactgtgcgcctgatggaaacgggacgcgggttctatgtggaaaaaggcacggtgcggcaggatacggacgaaaaagcaggggaagtgcacgcggaaaacgaaacgccgacttgcgaaagtgagtaaacctgtggtatgataaggagcatggtatgtatattcaccttggtatgggcgttgtagtgcgcgaagaagacgtcgtgggcattttcgatatggaaaacaccacggtctccggcgcaacgcgcgattttttgaagcgcgcccaaaaagagaaccttgtggaagacgtgtgctatgacctgccgcgttccattgtggtttgcagagactatatcggaggcgagcgcgtgtatatcacacagattgccccggccacgcttttaaaacgctcccgcgcggagatcggcggcattgcgctgagaccgcacgccaagggactgtaacagaaaggatcttcatttatgcagtatttcggcattcctacctgtccgtattgcaaaaagcatgtcaaccttgttcgcacgtggagattgaagcgtgagggcgagtataaatgcccgcgctgcggcggtatttccaatatctatctttctccgctcgtgtatgtgtttgccgtgctggccatctgcgccggcgtgtgcatctatttcttccataaattcgttttggatgacatcaagctgttcacttgcctgcaaattttcatcccgtttgcgattttcttctttttaagccttttcacggtgtatttaaagcgccctgtcatccgcagagtacaacgcgaagccccgcgaccggctccgcagcgcagtgcggagccggaaagacgtgctccgagccgtgacgatacgtttacggagatgaatacgggcagatacagagaaaataacgagccggagcgcagagtggaccgacgcgtctgaattctgacggcaagtaaaatgtaaagacctttgatgaaactttcttcagaaagtttatagagtctcggggtaaagccctgaaaaacagaaaatccacacggaaaagagctgccgaattgtaatttacgggcggctctttttgcgttcttaccgaccgaaaaaccgcagaaaagaggggaaagcggtgtgcattttcaaatatacatgcttttgtatgtttatgcacaaaaagccgcagaaaatctaagctttcagccgacatttttcaaaaatgaccttgtaaattttaccgttttgtactatactattatataaagataaccgcctgcggaactgtacaaatgaaacaggcggcgtttctctttgaatagatagcgaatgaatgtcttttatttcaaaggcacaaaaacacattcggcgttttcgtgccgaagaaaggaaaatgagagttaatatggatattaacgaaatgacgcatgtggatacgaattacgattcggatcaaatacaggtccttgaaggtctggaagccgtccgcaagcgcccgggcatgtacatcggctccaccggtccgcgcggcctgcaccaccttgtttacgaaatcgtagataacgccatcgacgaagcgcttgcaggctattgcgaccgcatcgatgtgcgcatcctgcccggcgacatcatctgcgtacaggataacggccgcggcgtgccggtcggcgtgcagcaccagacagggctgccggccgtgacggttgtgtacaccattttgcatgccggcggcaaattcggcggcggcagctataaggtttccggcggtctgcacggcgttggcgcttccgtcgtcaacgcgctttcctcgtggttggaggtcgaggtgcgccagggcggtcacctgtaccgccagcgcttctcacgcggcaacgcggaatatgacctgcaggatctcggccccatcgaaaacccggagcagacaggtaccatggttacgtttaaggctgaccccgagatattcaaagaaaccaccgtttatgattttgccacgctcgaaacgcgtctgcgtgagcaggcatttttgaacgccggcgtcaacatcatcctcaccgatgagcgtgacccggagaacatcaaaagcgaccgtttccactatgagggcggcgtagcaagttttgtggagtacctgaaccgcaaaaaagccgtggaggtcatccacccggatgtcatttatttctccgcgaccgcgccggacaacaactctacctgcgaaatcgccatgcagtatacggacagctttaacgagctgattttgtcctttgcaaacaacattcacacggtggacggcggtacgcacgaagacggcttcaagcgcgccttaacgcgcgtgatgaacgattacgcaagaaagtacaacatcttaaaggaagccgataaaaacctttccggcgaggatgtacgcgagggcctcacgtgcgtcatcagcgtaaaggtgaaggaggcacagttcgagggccagacgaagggcaagctcggcaatacggaaatcagcggccttgtcagcaatctgatgagcgacaagctgatgacgttccttgaagagaaccccgccgtggcacgcgccattttcgacaaagccatggcggcctcccgcgcaagagaagcggcgagaaaggcaagagaccttgtgcgccgcaaatctgcgctcgaaaacgcaacgctgcccggcaagctcgcagactgccagtcccgcaacccggaagagaccgaaatttacatcgtcgagggcgattccgcaggcggctccgcaaagggcggcagagaccgcaaatttcaggcgatcctccccctgtggggtaaaatgctgaacgttgagaaggcacgcttagaccgcgtttacggcaacgataagctcatgccggttattacggcgctcggtacgggcatcggcgaagagttcgatttgaataagctccgttacggtcgcgtcatcatcatggccgatgccgatgtcgacggttcgcacatccgcactttgcttttgacgttcttctaccgctatatgcgcccgcttgtcgaagagggacacgtgtacatcgcacagccgccgctgttccgcatcacgaagaataagcgccactattacgcgtattccgataacgagcgcgacgagatcatgacgcagctgcagaacggctacgatattcagcgctacaaaggccttggtgaaatggactccgagcagctttgggagacaaccatgaacccggagacccgcgtcatgctgcaggtcacgccgagcgatgccgcacaggcggacgaaatcttcaccattttgatgggtgataaggtagagccgcgccgcgagttcattgagcgcaacgcaaagtacgtaaagaatctggacatttaagcgcgaaaggatcagcaagcaatggataatatggaagaaaagaaggaaaacctcatacaggtggacctcagagagatcatggagacgtcgttcctcgattactccatgtccgttatcgtgcagcgtgcgctgccggacgtgcgcgacggcttaaagccggtccaccgccgtattctctacaccatgtatgaaaacgccctgtggccggaaaaggcttacagaaagtgcgcggataccgtcggttccgtactgggccgctaccatccgcacggcgatgcttcggtttatgacgcgctggtgcgtcttgcgcaggatttttccatgcgctatatgctcattgacggccacggcaacttcggttccgtagacggcgacccgcctgctgcataccgttacacggaagcccgcatgagtaagctttctgtggaaatgctgaaggatattgagaaggacacggtcaatttctccccgaactacgacgaccgtctgaaagagccgaacgtgctgccctctcatttcccgaatatcctcgtaaacggctccaccggtatcgccgtcggtatggcgacgaacattccgccgcacaacatgggcgaagtgcttgatggcgtgtgcgctatggtggataaccccgatattgaccttgacggcctcatgcagtacattaagggaccggatttcccgaccggcggcatcattatgggccgcagcggcattcgcgccgcatacggcaccggccgcggcagaatttacgtgcgtgcccgcgcagagattgtggaaaagccgaatggccgctaccagatcgtcgtcaccgagctgccgtatcaggtcaacaaagcaagactcatcgaaaacatcgcagagcttgtcaaggataagcgcatcgacggcatctccaatatcgacgatcactccgaccgcaacggtatgcacatcgccatcgacatcaagcgtgaggcttccccgcaactcgttttgaaccacctgtattcgctcacgcagatgcaggtcacgttcggtgtcatcatgttggccattgtagacggccagccgaagctgctcaccctgcgcgatattctgcaggaatacatcaagttccagagtgaagttgtgctgcgccgcacgcagtttgaccttaaaaaggcgcaggagcgcgcccacattctggaaggcctcatgatcgcgctcgacttcattgatgaagtcatcgccatcttgagaaattccaagtctatcccggaaggcaaagtcgccctcatggagcgcttcggccttgacgatgtgcaggcacaggccatcgtgcagatgcgcctcggccagctgaccggccttgagagaacaaagctcgaggaagagcttgccgcactgcgcctgaagattgcggattttctcgacatcatcgcaagcgaagcgcgccgttacggcatcatcaaggatgaagccatggagatgaaaaagcgcttcagcgacgagcgccgcacggagatcgccgccatttccggcgaaatggacgtggaagacctcatcccggaggaagactgcgtcttgacactgacgaacttcggctacgtaaagcgccagacgctcgacacgtaccgcacacagcgccgcggcggacgcggcatctccggcatgaaccgccgcgaagaagacgttgcgagcgagttgttcattgcaaattcgcatgacttcgtactgttcttctccgacagagggcgcgtgtaccgcttaaagtgctacgagattccggagggttcccgcacaagccgcggcatgaacatcacaaatctgctgccgcttgagcccgaggagcgcatcacctctatgctgcgcgtcacaaagtccgaggaggaagaccacttcctcaccatggtcacaaagaacgccgtcatcaagcgcgttgcgctctctgcgttccgcaatgtgcgcaaaaacggtcttatcgcactcgatctcgccgaggacgacgagctcagctgggtgcgcctgacgagcggcagcgacgatctgcttgttgcaacgcgcttcggcaaggtcattcgtttccacgaggccgacgtgcgcgaaatgggccgtcaggcccgcggtgtgcgcgctatccgtcttgcagagggtgacgttgtggtcggcatgagcgtcctgcgcgaaaacggtctcgtgcttacggtttccgagaccggctacggccgcctctcgaaccccgaagattaccgcctgcagcatcgcggcggcatgggtatcctcaactaccacgttgaaaaatacggcaatgtcgcggccattaaggttgttgatttcaatgacgacatcattctcatcgcagatgacggtgtgattatccgtatcgaagccggttccattcgcatctgtgcacgtcccagcaagggtgttcgcgtgatgaaggtcaacgagggcagcaaggttatcaccatggcccgcgccccgcatgacgacgaggaagaaatcagcgccgtagaagacgacggcaccgccgaagagggcgaagatgagcccgtaacggaagcggaagacgtcatccgtgacgatgaacccgcagaagaaacagaagaaaccacggaagagtaattttccgggcaataaaaaagagcgttggtcagaagaccggcgctctttttgcaattttttagttacgcgtttggatccataatggcgccgtgaccgcagcagtaggtgtatacgtccgtcgggaacaggctctgcaaatatttgcgctccgcggcagcgcggcgggaatcgaggttcacggtggtcattaaatacggtgcaagcaggttaaaatcatactgctcttttgaaaagcccttgatgttcaccatgatgtcaccgctgaaaacaatgcggtgcgcgtcgtccacaagcacgatctcgcccttaaagtgcccgccgttgccgtcgaaaacgcgcagggtaagaccctcaaactccagcgtgccgcgcggggagatgggtgcgtcgcttgcaggctctgtgtgctcaataacgcgcagcgtgtgcatatcgggtggcgtgtagcccgtcatcagcttgcagatgcggttatacggcgcacaaatgcggttctgctcgcgcagatcgggcagaccgttgttctgcaaggcgaaattcagccgcgtttcctcgttcacatagaatgtgtcgaacaggtcgtgcaggccgcaatggtcgatgtccgcatgcgtgacgataagcgtgcgctccatattgtcaaagttcgggaacaggctgcggaaaatcttcagcatctcgtccttgtagcacgggaagccgcagtcgatgaacagcagcttgcggtttttctccagaatatacgtgttgcccccgcacggcggctcgatgatgtgcatcgtaaacccgccgaacagactgcgctgcgaaatgcgcgcgcggaagttttcgcctttaaagctgtgcagcatttcggcgattttgccgatgtacgaaaacgtcttgtgcggcgcttcgcctttttcgtcaaggtgctgcatcaaaaggttggagtctgcaatgagcgcgtccatatcttcctgcggcaagtgcagggtagaagccagctggtgcgcaaacgaaaggtaaaacaccgtgttatcgagcaccttttggcttttgtcgtagtttaaaacacgcatttcgcacagctttgcggcgcggtctaaaaacgccttcgtctgtgcgggatcctgaatgtaaatgccgacctttaaatcctgatggtcggtgtcgttttcctgcccgctcatgtacgtgatgttaaaattaaagctgtcgatgagctccaaaacgggcagcacggcgctcggtacgttcggcagatggaattccagcaaaatcgttctgccggggttatcctcattcaaaatatagcctacgtcgtttaaacgcacagcgatggtatcaagctgcgcctgcgagccgctgacctccaaaaacagcacgtgcaggtcaacggctttattgtagctgacgcgcgtgatgttcgcgccggactgcgccacaatgcgcgtagccttcaaaaacgcaccggccttgttcggcagtcgcgtgatgaatgttcttttcatgtgcgcctcttaaagcttgccggcctttacgagcgcggcggtcttcaaaatgcctacctgcgttttggaatcgggaatttcattgtttaacaccatctcaacggctttgtcgagcggaattcgctccacttcaagaaactcatcctcgtctaagtgcattttgcctttttgggccacacggcacgcccagatgcggatgatctcgccgcagtagccgggagaggggtacagattgccgagcgaaatgtagttttcgcccgtggtgccggtttcctccatctgctcgcgctttacggcctcaaacgggtcttcgcccttttccagtttgccggcgggcagctccagcagcacttccttgtacggataacggaattggcgcacaagcagcacttcgttttgttcggtcagcgccgccacgcacacgccgccgttgtggcacacaacctctcttgcactcgttttgccgttttccagctccacggtgtcgcgcagcaccttgatgatgcggccctcaaactttgtttcgcttgtcagtgttttttcaaagagcttcataaactgtcgttcctttctctttatgataaaaactgcttgattttctcgggaagattaccctactattatataaacattttcttaatttcgcaaggcgcgggcgggattctcttgcataaatcccgcgaatgtggtacattttatcagaaccaaaaatttctcgcggcggtgccgcgtgccatatcccatttttgaaaggaacatgaatatgaaaacctgcattcgtttgctgtgcgccgtttgctgcgccgcgatgctgctcaccacgaccgcctgctcgggcggcaataaaaatacgtcttccgccacggcagaagcgacccctgcgccggagatcactcctgcgccggaggcaacagcggcccccgaagaagaacccacccctgcgcccgaaggcaacacgtcctccgaaacgggcgaaaatagccacacaagcaccttgccggtaccggaaacgggcagcgaggaattccgcgccgcgtttgaaaacaaccccatcgatacgcagtatgcggacgatatggaaacggcgggctctgttgcgggcatgattactgcgtgcaacacggcttccgacagctggaaagagcagattgattccgtctacacgcagattttggagtatggcgatgataaaacggtcgaaaccgtcaaagaggagcagtcccactgggtgaacgagcaaagcaccgctttgcaggacatccgcgattccgtatcggagaatgacccccttgcggccatcaccgtggcagagagcatcatggtctattaccgcacaagggccattgacctttgcgccgtattatacgatattaacggcacattggcgttcggctaaaatcaaaaaatacagaggatttgtgtatgaaaaaagcattcggcgcaattttgatcgcggttattctcattgtctgcgttgttaccctcacggtgcagcgcggcgaaaacgccatgctggagttcccggagcgccccgcagagggctgcacggtgatgtctcttgaaatcaccgacggcaaagcgcagaccgaagtcatcggcacgtacaatgtaaatgaaaatgtgctgacgatgaacacctcggcgcttgaaaacgcagagcctaccgaaagcggcgaaaactacacatacacgctgccggaaagtatcccgaatttttatttcagcgacaccacgcagggccttttgctctacaagggttatttatacgtggtgacggcgacgacgagcggccagacgctggaaatcataaatctgaaaaccggcaccctcggcggcaaaatctactattcgcagtttttgaaggaagaaacgttctccgcgacggaataaagcatttttacgaacttaagcatccaccggacgctttttgggcgtaggaagctcagtcgcaggagttttctgaaaagcgagtaaagcaagttttggaaaaacaaaaaaggtgacgcactatggaaaagacccgaaaaacgcgtaaaaacccggtgtattcgctgtttcaaaaaatcccgtctttcggaaagcttgttttggttttagcaatgctttttgcgaatatcccgctgtatcggttttgttctgcggccggaacggttcttccgcagcttgtcacgaattttgtgttcgtcctttatattgcgctgtttgtaaatgtgctgtattatgccgtgctgacgtcttatatcgtgcagaaaagcgatgagacgaaaagccacagctgcacggtcgtgtctgcagggtcggccgtcagcgtgatcgtcctttccatcggcatcacgctgtttggcacctttgtgcagcaaaatgatttagataccctgctccggcatagcgactccccgaatgagaactacacggtcgaggtgcgtggaagccgaaaagacccgtacagcgggtacgacgcggacgtgtatttgattgataacaaaacgaacacgcgcgagtatatcaacgcactcaccgacgagcagcacatttacattaaatggacatcggaaacagaattttatatcggcatgacggattatatgatcaccgataaaggcgtgacatatcaaagacatcaaaattagaacaaaaaaggcagcctgcatacacacgcagactgccttttttttacgaaaaattacttattaaacgggttctcggacggatagggcagggacttcggctggttgtagccgatgttctcgacgccgaggtacttgaagacttcaaacagcgccttgccgtagtgaccgaacgccactgcgccgtggtgcgggaagttcttctcgatgagcacatggcggtagaagcggcccatttccgggatagcgaatacgccgatggaaccgaaggagtgggacggtacgttcagcacttcgccctctgcaacgtatgcgcgcagctgggtgtcggccgtgctctggagacggaagaacgtgatgtcgcccggggcaatgtcgccttcgagcgtgccctgcgtaacctcaatcggcagggagcgcgccatgatcttctggtacttcatggagcagaacgccagcttcttggagcaggtgttgccgcagtggaagcccatgaaggtatccttctgcgtgtacgtggtcttgcccttaatgtcgctgttgtagaggtctgccggaacggtgttgttgatgtcgagcagcgtgacggcatcgaggctgacgcaggtgccgatgaactcggaaagcgcgccgtagatgtccacttcgcaggaaaccgggatgcccatgccggtgaggcggctgttgacatagcacggaacaaagccgaactgcgtctggaatgccggccagcacttgcctgcaatggcgacatactcgcggtagccgcggtgatcctctacccagtcgagcagggtgatctcatactgtgcgagcttcggcagaatctcgggcttcatgttgcccttgccgagctctttttccatgtcttcgacgaccttcgggatacgcgggtcgccctcgtgcttattgaacgcctcaaagaggtcgagctcggagttttcttcaatctcaacaccgaggtcgtaaagcggcttaatgggcgcgttgcaggcgaggaagttcagcgggcgcgggccgaagctgatgatcttgaggctcttcaggccgatgatcgttcttgcaatcggcatgaactcgtgaatcatgtccgcgcactcgtcagcagtgccgaccgggtattccggaatgtaaacctttacattccgcagcttcaggttgtagctggcgttcagcatgccgcaatatgcgtcgccgcggccgtccatgaggtcttctgcggattcttccgcggccgcacagaacataacggggccgtcaaagtgctttgcaagcagcgtctcggaaatttccgggccgaagttgccaaggtaaacgacaagcgcgttgcagcctgcgttctttacgtcttcaagcgcctgtaccatgtggatctcgctctccacgatacatacggggcactcataaatctcggtagcaccgaacttctttgtgtaagcgtcgatcagtgcctttctgcggttgacagaaagggattccgggaagcagtcacggctgacggcaacaatgccaaccttgacctggggaatgttgttcataaagtgattcctcctgtaaataaacgggtgtgtatgtgttttgtgccgaaaaaacggcgcaaacgatttgtatgtacaactcatacacggctattgtagcgcatcgcgcggaaaaaatcaacaggaaaaaacggggttattattcgtcttcgtctgtaatctccgggcggatgaactcaaaaatgcacagggcgccggcgtttttgcacactttgtactcctctgccgttcgcagcgtccaattcacttcctgcatcttcattttgtcgcaggcaatgcggtggctgatgttgtttctgaaatgcacgtcatacgcttcaaagtgcggacgggtgaggacattcgtccacaagtttctccagaacagcgcgcggaaaaagcccttgcactcctcgtccttgccttcaaagtgacccatcagctgaccgcgcagcacatacgggtggttcttcctgaaccactgcacaatgtacgggtcaaatgattccacgcagtacgggcctttatagttgcgcagcagctcccacacgagcgggcacagcagatcggcatcgtcgtagtgcttcagttcaatgatgagcggcgttctgccgtccacaagcgccagcacgtcgctgaaaagcggtacgcgctcctcggtgttctgcaaacggtactgctgtaattccttatacgtcaggtcgccgatggaaacatccgcgccgcagacgcgctttaagctgcggtcgtggtgcacaacgaccttcttgtcctttgtcagctgcaggtcaaactctatgccgtagcccgcttccacagcggccttaaagcctgccatggagttttccggcacggaaagatctttttcgtgcaggccgcggtgggcgtagtcatattttttcatctcggcaaaatcgccgcgcggcgaagccggcgcaatgcagaaaagccacgccagaaagcccagacatacaacaatcagtacgatcaaaattccccaaatcatttttaccctctactttactttttaagtttatttcggcaccttgatttcttccagctttttgcggtactgcaaaggcgtggcgtcgtattcggtgcggaatacttcgatgaaatagctcatggagttaaagccacagtccatggcaatgtcgagcacgcgcagatttgtggcggtgagcagctccagcgcgtggcttaaacgcacgccgttgatgaattgcaccggcgttttcagtgtatactgtttgaacacgcggcagaaatgtccctcgctcatgccggcggcgtgcgcaagctgctgtacggagacggcagaccggtaattttcctgtataaacgcaatggcagccttgatgctgtccgctgcggcacgcttagaagcgctgatgcgcgccgacacgccgttttgcaccagtgcgccgaatgccgaaagcatggcggcttttacgggaaactcaaaaaacggcgggcggttttccagcatcgtgtacgcggtctggaacgcggcggaaacgctttcgtgcaaagtagttccggctctgatcagccgcggcacggtcagctcgccgtccaaaacgggctgtatgtactttacgcgaatgatgtcatttgcggtgctgcacagcaaatcggggctgaacacgatggcttcaaagtaaagctcctcgccggcttccaccggcacggcggcgtgcagctctccgctgttgaaaaacacaatgtctccggcgtgggcctcaaacagatcggtgccgcactgcacggtcagcgtgccctgcatcacacggaaaagctccatttcgctgtgccagtgacaatcaagcgcgtgaaagcggtcttcgcgtcgtatgcagtagttcatcacgggcatcagcgcgtcgccgtggcggcgggcctcccgcatgcggtcaaattgatttttgtccgtaaaacgcacctcctttttaggctcagtggtcaggattgttataaaagcggacaaattagcggtagactttccaaagcatatcgcttatacttatgatagagcaggcgcacgaaaagcgcaagtgccaataacggaatttttgaatttttttgaaaggcagtgagttgaatatgaaatttacgaaaggctactggatgaaccttcccggcgtgacaaacacggacgccgtgcaggttcgcgaagtcaaggtagaaaacgaccgcgtttacctctacaccgtgccgtaccacgcagacatacgcgccatgggcggcccgcttctggaaatgtacatttcctctccgcagccggatatcatccgcacggaagcgtaccactttatgggcagcaaccagaaaatgccggcgttcgagctgaacgacgcacactgcgcactggaggtcgagaacaccgaaacgaccgtgacgatcaagagcggcaacacaaagctcgtcatcggcaagaacccgtgcagctttgattactactataaggacaagaagctgacaagcatcggcaaccgcttcggcaacgcgatgatcagcaccatctccaccccggacggcaactacatgcgcgcccagatgaaccttgacatcggcgaaaaggtctacggcctcggcgagcgcttcaccccgtatgtgaagaacggccagaccgtggagacctggaacgaagacggcggcacctgcaccgaaatttcttacaagagcattccgttctacatcacgaaccgcaactacggcgtgctcgtgaacgacccgggcccggtctcctatgagatctgctccgagcatgtcacgcgcgtacagttctccgtgccgggcgaaaagctcgacttcatggtcgttggcggcgacagcatgaaaaacgtgcttgaaaactacaccacgctttccggcaagcccgcactgccgccggcatggacattcggcctgtggctcacctcctccttcacaacgaagtacgacgaagagaccgtcatgggcttcgtaaacggcatgaaagagcgccacattccgctgcacgtgttccacttcgactgctactggatgaaggaaaacgaatggtgcaacttcgactgggatcgggccatgttcccggatattgagcaccagctgcaggtgatgaagcacgaaaacaacctcaagatctgcgtttggatcaacacctatatcggccagaagtctccgctgtttaaggaagcgaaggagcttggctacctcctcaaaaagccgaacggcgacgtttggcagtgggatctgtggcaggccggcatgggtatcgtggacttcacgaacccgggtgcatggaagtggtatcagtccaagctgcgccacctgctcgaccagggcgtcgattgcttcaagaccgacttcggtgagagaatcccgaccgatgttgtctactacgacggcagcgatccgctccgtatgcacaactattacacctacctttacaataagtgcgtttgggaagtacttgaggagtacaagggcaagaacgaggcgtgcctctttgcaagaagcgccacggtcggcggacagaagttcccggtacactggggcggcgactgctcgtcgaactactcctccatgtccgaatccctgcgcggcggcctttccctgtgcctttccggcttcggcttctggagccacgacatgagcggttttgagggcaaggctccggcggacgtttacaagcgctgggcggcgttcggcctgctctccacgcattccagactgcacggctccgattcctaccgtgtgccgtggctgttcagcaaggagggtgaagagaacggcgaggaatctgtagccgttctccgtaagttctccgagctcaagtgcaccctgatgccgtacatgttctccgctgcggtcaatacacataaaacgggcgtgccgaccatgcgcgccatggttctggaattcccggatgacatcccgtgcgaagacctcgaccgccagtatatgctcggcgacagcctgatggtcgcaccggtcttcacgaaggaaggcgacgtcacatactacctgccggagggcaagtggacgcacctgctctcgaacgaaaagcgcgagggcggtcactggctgcgcgagaactacgatttcttctctctgccgctctttgcaagagagaactccatcgtcgccatcggtgcgaacaaccaacagccggattacgattacggcaaggacctcaccctgcacgttttcgagctttccgataaggcgagcgcaaaggtttgcgacagcaagggcaacgatatgctcagcgtttccgcagtgaacgagaacggtgttatcaccttcaagttcgacggcaaggcagagaacctcagcgtgctgctgcgcaacgtggagaacgtgaagcacgtctccggcgcagaagtcgagcaaaatgagctcggcactgtcctgaaggtcaacgcagacctcagcgacgttgttgtaacgctctgataaaataaatccaacacccgcagaacggcatgaaaaaccgccctgcgggtgtttttctgcaacgctttatgcgaccaaaaagaaagcgcagagcacggggaaaacccacgctctgcgcttatctttatcttagaaaaattacttcttgctgttcagatattcctgaatggcagaaaagaccttgtcaacatccaggccatgtacggcacatgcgtcctcaagggactcgtggatggaggacgggcagcctacgcagtgcatgccggactgcatcagcacataagcgatgccgcggtcataatccagcatttcgcccatagtggtctgctttgtgatttccatctgaaaacatcctttcttggtatagcatcccatcgggtcgccccgatctatccgtataaatcaaactcccgcaaacttcgcgtgaactctaatctacacgaatttagtatacaataggatatgccaaaaagcaagtgtttttgcagatttttggcatatcccttaaattggaagaaacgacaaaacaagggggggaattcagtcagtttgcgccttgacgctgctgcgaattttcctttataatcaagatagaataatattaccattttcagaaaggcggatgattttatgaaaaaacgaatgaccgtaatgctttctttgtgccttagcttgctcctgcttttgtccgcctgcgcttcgggcggcagcacggcaaaaaatgcggaaaaagccgcggtcgcgttggcggaaagcatgctgaacgcgccgagtgagcccatgcagcgcttcggcagtattttggaaaacggcgaagaaagcgcccttacggcgtacaaagatgcttgggaagacgaaaaagccctgtgcagcgaaaacggcttcacgagcttcattgaagaagtactgaccatgcagcttatggcggacgaaatgaacgagaccgtgaaggtgaccgccgtcaagaccgagccttacgaagaaaaagatcgtgtggtgcgctttacagcggacgtcaccgtgaacgatacggaaaacatgacggttagcggcaaatgtcagttcgatgaagacggcaaagtctcgttcatcgagctcgatacgaacgaacttgagatgacgctcatcgcaaacgataacgccgaccccacgcaaaagccgcccgcaaacggcaacgccatcacgttaaatgagtaagcaaaagatgaagtccgcacaaaactgcgggcttcatcttttgaattcggcatgcgcggcacataaaaccgcctgcaagccgaatttctgtttttaaacataaaaaaaacgaacatcctattggatgtccgctttaagtgttggcgccaacctatcgtcccgggccgttgccagccgagtattttcagcacaaacgagcttaacttctgtgttcggtatgggaacaggtggaccctcgttgtaatcaacaccaactattctgtttgccgtctcatctgacggctttgttataataccacatccattctggaattgcaagccttttttcaaaaaaatttcaaaaagttttgagaaacctatatatagttaaaattcaactaatttctctaaatatagaaactgaaaacacaaaaatatccgtatgcacgcggcggtacatacggatatgaaaaacttttttgaaatttacgtcgtaaaaacaaggtcacattgcttttcaacggggtaggaagtgaagtagaggttctcgagcgggatccatttttccacgaacatcttgtgccgcgcggggccgttgcgttttaaaatgcgtgcgctctgtgtctccggcgaggtcttgagaaaaattttgagatcgtagcgcccgataagctccgggtgcgtagagtacgagccctctaaaatgttcagcgtcttcggcgtgacctgcaccgcgtcgccgaggtccataacgccgcaatcgaacacgcggtaggaaaacgactcgttcttcggaatctgctccagaatatccgacaaaatacgctcccagtgcacattgccgcccggggtggcgtagcgctccggcgtgcgcatggacatcggcaggtaaaaatcatcggcgtggaacaggttgcagtcgtaaacgctctgcaaaagtgccgcaaacgtcgttttacccgagccgcacagcccgtcgattgcaaccgtcaccggggctttttccgccgtcaacttatcgatcgcgatgaatgccgacagaaaatccgcatacgcttttttcaccacgcggtatgccgggtgatacgcacggcggtacgcttcgctgtggtgcacggcagggcagcccgccgcgcggtacgatttcaaatacgccgcgttttcggatttgtcgaacaaatcggcgttttcaagctcgtccaaaagtgataaaaacgccgttttgtccgtgggcgtgtcttcggaagacactttaaacatagcaaaaagtgttttcggtgaaagctcctgtaacgcgctcaagttgatgcgcgcgtactgctcgccgagggcttccgtgtacggtgcatcaaggttggcaatctccgcttcctttaataaatatagatacgcgccgtcggggtcgctcaaaaagtggccgccgccaaagctcgcctggtacaaaaacttcaccgcgtcctgcacttcggattcgggatgcgttttcaagtgggcgcacaacgcttcaaacacgcggctcacagcgcagcaagctccttgtagcagtccttcagcgccgggtacagcttcgtgtacatacggtagaacgcctcgtacttcggcacgttttcctcaatcggctcctgcggggcgttgaggcgaataacgcggcggcagccctcctgcacggatgggtacagccctgcgcccacaccggcgaggatggcaacgcccagcgccgggccttccttggaaacgaccgtgcgcacggcgcagttatacgtatcggcaagcatctgacgccacagcttcgaggaaccgccgccgccgcaggcgagcatgccgtcaatggaaacgcccatggttttcagcacctccacgctgtcgcgctgggagtatgttacgccctccatcacggcgcggagcatgtcgtacttcgtgtgcatggcggaaaggccgatgaacgcgccgcggcagtccgggtcaaggtgcggagtgcgttcgcccatgagatacggcagataaagcagacggttgcagccgatcggcgaacgcgccgcctgctgatccatcagataatacgggtctacgcccatgccggctgcggtctctttttccgcgccgcagaagttatcgcggaaccacttaagggacagacccgcgccctgcgtcacgcccatcacgtgccatgcgcccggtacggcgcagcagaacgtgtgcacgcggcccttcgggtcgatggaaatgttatccgtgtgcgcaaacacaacgccggaggtgccgatggttgtaaacgccttgccgtcctccacaacgccggtgcccacggctgctgccgcattatcgcccgcgccgccgaccacgatggtgcccgccgcaaggctggtgcgctttgcggcttcttcggagatgacacccgtcacttccggggattcatataccttcggcaagagtgccttgtcaatatcaagcttttcaagcacttcgtcgctccagcagcgattcggcacgtctaaaagctgcatgccggaagcgtcggagacctccgttgcaaagtcgcccgtcagcatgtagcgcacgtagtcctttggcagcagaatgtgcgcgcactttgcataaatttccggctggttgttgcgcacccaaagaattttagatgccgtaaagcccgtcaaagccgggtttgcggtaatctcaatcaggcgctttgcgccgacgcgtgcggtgatctcctcgcactcctttgccgtgcgctggtcgcaccagatgatggagcggcgcagcacgttgccatccttatccagcatgacaaggccgtgcatctggccggaaatgccgagtcccttgatgtctttgttatcgacgccgctttcggtgatcacggcgtgaatggtatctgccgccgcattccaccaatcgagcggctcctgctctgcccagccgtttttttcctgatacagcgggtattctatcgttttgctcgcgactacattgccgtcttcgtcaaaaagcacggtttttgtgccgctggtgccaagatctacacctaaaaggtaattcatattaacgtcctttcttttcgaaaaatggtttcaaatatatagggcattctgcctccattttattttgaagcattttcccatttgtgtcaagctttttttgttgaaattatgcagactattttaattgaaacgcgcggttttgtatgatacaataaaaaacaagagcttcgtcggcgatttataggggaaaagccgtttgaagcggtcttttggtgtatttgaaaggattgaaacaaaaatggagaaaaaacgatatgacgccgtcgtgatcggcgcgggcgttacgggcagcgccatcgcccgtgagctttcgcggtatcaggcagaaatatgcgtactggaaaagggcgaagacgtctgcaccggcacctcaaaggcgaacagcgccatcgttcacggcggctttgatgccaaaacgggctcgctgaaagccaagatgaacgtcctcggcaaccgcatgatgacgcaggtcgcggaagaactggatgttccgttccgcagaaacggcgcgttcgtgctgtgctttgacgaaaacgacatgcctgcgttaaaggagctttatgagcgcggtgtgacaaacggagtagaaaacctcaaaattcttaccggtgacgaagcgagagaaatggagcctgcgctcagcgacacggtcgtcgcggcgctgttctgtccgtcctccggcatcgtatgcccgtttgaattgaccttgggctttgccgaaaacgctgagaaaaacggtgttgagttcaaatttgagtgcggcgtgcaaaatatccgccgcgaaaacgacctctatattctcgaaaccgaacagggcgagatcgaaacgcgcgccgtcatcaacgcggcgggtgtgcacgccgatgaaattcacgatatgctgctgccgcacgcgttcaccatcaccccgcgccgcggcgaatactgcctgtgcgacaaaaacgcgggcaatttggttgataaaaccatcttccagctgccgacaaaactcggcaagggcattcttgtcacccccaccgtgcacggcaatctgctgctcggccccaccgccgagaatatcgaagaccgcgaggacacggccacaacgcagagcggccttgcattcgttttggaaaaagccggtatgagcgtgaaaaacgtgccgagccgacagatcatcacatcgttctccggcctgcgcgcctgcgcggacagaggcgacttcatcttagaggaaggcgcgccgaacttctttgaagccgcgggcatcgaatccccgggcctcacaagcgcgcctgccatcggtgtttatatggcggaaatggcggcgaaagcgcttggccttacgaaaaaagaaagcttcaaccccgttcgtcacggcgtcgtgcacctcaattcgctcagcgtcgaagaacgcgccgagaaaatccgtgaaaacccgctctacggcagtattgtctgccgctgcgagacgatctccgagggcgagattgtggacgccatccgccgtccgctcggtgcgaaaacgctggacggcgtaaagcgcagaaccagagccggcatgggccggtgccaggcaggcttctgctccccgcgcgtcatggatattctcgcaagagagcttaacttgccgctgacagccatccgaaagaacgaaaaaggctccgaaatcgttttcgggaagacgaaatgaggtttattatggaaaataaaatcacaaaatcgcttgtcatcatcggcggcggtcctgcggggcttgcggcggcggtcgccgcggcggaaaacgggcttccggctgaagacatcttaattttagaaagagacgggcgtctcggcggcatcttaaaccagtgcatccacaacggcttcggtctgcacacgtttaaagaggagctcacgggtccggagtacgccgcgcgctttgaagaacgcgcaaaggctttgcatatcccgtacaagctcggcgcaatggtactgagtatttccccggaaaaggtcgtcacggcggtcagccgcgaagacggtctgttcaccgtggaagcgggcgcggtcattttagccatgggctgccgcgagcgttcccgcggcgcactgaatatccccggctttcgcccggcgggcgtgttctccgccggcacggcgcagcgccttgtcaatatggagggttatatgcccggacgcgaggtcgtcattctcggttccggcgatatcggtctcatcatggcgcgccgcatgacgttagagggcgcgaaagtacacgtcgtcgcggagcttcagccgtactccggcggcctcaagcgcaatatcgtccagtgtctcgatgacttcggaatcccgctgaagctcagccacaccgtgacggaaattcacggcaaagaccgcgtaacgggcgtcaccatcagtgctgtggacgacaaattaaagcccatcccgggcacggaagagtattattcctgcgatacgctgcttctgtccgtcggtctgatcccggaaaatgaactcaccctcggcgcgggcgcaccgctctcccgcgtgacgaacggccccgttgtcaacgaaagcctcgagaccggcgtgccgggcatcttcgcgtgcggcaacgtgctgcatgtgcacgaccttgtggactatgtttccgaagaagctgcgcaggccggccgtgccgccgcaaagtacgtgcagggcggcaacaaagaaaccgcagagccgctttcgggcggcatcaagctcgaagccaagggcggtgtgcgctacactgtgccgagcatcattcaccccgaaaatatgccggatacgctcacggtgcgcttccgcgtgggcggcatttataaaaattcgttcatcagtgtctatttcggcgatcagcgcgtgcagcaccgcaaaaagaccgtcatggcaccgggcgaaatggagcaggtattgctgaaaaaagcagaccttcaaaatattgattttgataccgtcaccgtcacggtggaagcggaataaggagggcattactatggaaacgaaatcgtttatctgcatcaactgccccttgggctgcccgctgaccgtcactgttgaaaacggcgaggtgaaaagcgttacaggcaatacgtgtaagcgcggcgagctctacgccgtgaaggaagttaccgcgcccgcccgtaccgtcacgtctaccgttcgcgttttaaacggtgaacgcccggttgtcgccgtgcgcacgaaaacggacatcccgaaggataagattttcgactgcatgaaagccatcaacgcagcggagatcaccgcccccgtccatatcggcgacatcgtcatcgaaaatgtttgcggtaccggcgtaaacgtcgtcgcttctgcggacgacgagttgggttaaaagtctttgattaaactttcttcagaaagtttatagggcctcggggcaaagccctgaggcgcgctccgcagcgcgcgaaatccttttgcttaccccaaaatcaggactgggagaaaccaatgcttcgcattgctataaaacaatccagtgaattgttcgtccgagggagaccttattaaggggtctccctatgaatttgcacggcaaattcataaaagataaaacttttagaaagagagaataaacgtatgaactataccgatatcaacgccaaaaccgtggacagctgggtgaaaaacggctgggaatggggcaaacccatttcgcacgaggtgtttgagaaagccagaaacggcgaatggggcgtgtacctcacgccaacaaaagccgtgccgcacgaatggttcggcgagatgcgcggcaagaaaattctgggtttagccagcggcggcgggcagcagattcccgttttcaccgccctcggcgcagactgcaccgtgcttgattattccacggagcagctaaagcgcgaagaagaagtcggcgcgcgtgagggatacacgccaaagtgcgtccgcagcgatatgacaaagccgctgccgtttgaagacgggacgtttgaccttatttttaacccggtttcaaattgttatgtagaagaactggagccgatctggaaagagtgcgcccgtgttctgaagccgggcggcgttttgcttgtcgggtttgataacggcttcaactatcttttcgacgaggacgagacggttatcaaatacacgctgccgtataaccctttgaaagacgaggcgctgtaccgggaagcgatggatctggactttggcgtgcagttttcgcacacactggacgaagaaatcggcggccagctgcgcgcgggatttatgctgacggatatttatgaagacacaaacggcgaaggctttctgcacgagcacggcgtgccctgctttgtcgcaacgcgctgtgtgaaaaagtaatagctgaataaaaaaacgtaaaaagcacggctttcccgaaaaacggcggaaaagctgtgttttttaaattttgccgcaaaaatattttttgaaatcgcacatttgaaaataaaagtataagtgagaaaaacaaagaataaacgagattggaattcgcagcttaaaaaaccgcaaaaaagcgcttgacaagccgtttttcgtgtggtactatcatttagcgcccatgggaaagctatgggcattttcagagatttcgtatcgcagcgcacaaagcgtttgccggtaccgagataatttaaatcaattttggaggtaaacgctatgtccacttatatggccaaggctggtcaggttgaccgcaaatggtatgtaattgacgctgcaggcaagccgctcggccgcgttgcagcacaggccgcagttcttctccgcggcaagcacaagcccacctttaccccacacgttgactgcggtgaccacgtcatcatcatcaactgcgctgaggctgtcctcaccggcggtaaggctgaaaagaagtattattatcatcacacgggttatatcggccacctcaaggctgtccgttatgacaccctgatgcgcacaaagccggaaaaggcgatggaacttgctgttcacggcatgatcccctcgaacaccatcggcagagctgcagaagcaagacttcgtgtctacgctggcagcgagcacaagcacgaggcgcagaagccgacggcttgggaactttaataggaggtaaacgaatatgtacgataaggcaccttatttctacggcaccggcagaagaaaaagctccgttgcacgtgtaagaatttaccagggcaccggtaaggtcacgatcaacgaccgcgatatcgacgattatttcggccttgatactctcaagacaatcgttcgtcagccgctcgttctcaccggtaccgaagaaaagttcgacatcgtttgccgcgttgcaggcggcggtgttaccggtcaggccggtgctatccgccacggtatctccagagctctgctccagtacgattccgaaaacctccgcgctacgctgaagaaggccggttttctcacccgtgacccgagaatgaaggaaagaaagaaatacggtctcaaagccgctcgtcgcgctccgcagttctccaagagataatttccactgcttctcagtgcgtctttggacgctgttttgcagaaaattggatgcttttggagttgtgagagttcctcagaagtgttccgttttgcttcgtaaggagcaagcaaggagcacacaaggaacaagaatcgcaagcgaaaacaaaagccttatgaagcaggagatcgttccgcaaggagcgtatctcctgcttttttgtgctgcacggcttttccttcttccgtttagatcttgttgattgcctccaccaatgtttcaatatccaggtgggtgtagacacgttcagtgagcgtcatggcaccggagtgtcccacaatcttcttgatcatgatttggtctgcatgggcctctgtcagcatggagatgcaggtatgccgggtacagtgtggcgtctggtcatatccaagctgctccatcaggggtgtgaagtaactatcgtagtagttcctgtaatcaaagtgcttttgatccggtgtgtggagcagatattcacactgagaacctttgtaccacgctttgtagaatggcagcaccttgtcggcaatgggaactttccgcaggccgttttcggttttgctggcgatcacatcgaagtactgttcttccagatgtacgttttctttcttcaagtcgaggaactctgagatgcggcaaccattgtagatcagcatcagcacgatctgatagtacgggttctctgcaagctcccacaggcgggcaatctgctcctttgtgaacttgttccggtcacgcttgttggggtttttgtccttgtaccggctcaaatccacaaactcggaataatccttattgcagatatcatttttcatggcgtaggcatacagctggttgaacagccccttgagctttttcagggtggggtaattcttcccgcaggtgtccaccacaaattgaaggtccatcagtcgaatgtcccgaaacaccttgttgtaaagtgttccgcacacccgataggacgcctcatagccttttacatttgacttggagatggtggggaacttctcctttgaccagcgttcatagacctcctggaaggtggctttggatgccttgatgtcaaaggggttgttgttatactctgccaacatttgcagcccctctgctctggttgctgcatagccgatggtgatttgctcttgaacggacttgcctgtttctgggttaacatgccaccctaccgttttcctcactgcatagggtcttcttcgctttccggacattttcttgacgcttccatatccgttgggtaatctcaaaaaatctcaaacttcctttctcccagcgttttcaaattaaatttgacaggggtatgtaacacccaccgttatttctggtcgccgttttcttcggcggcctttttcattttctccagcatctgctgatccagttcgttgcgccgctgaatgcgctccaaatcggagagagcttccacttccttgtcctgaagtttagtgtgtgcataatatgccagttccttttcaatccagcggtcaaaggattcctgatcggtccaataggtttccagcttttcacgctcgtcccggaactcttccaaaatcaggcacagggaatcattcatctctgcggagtggtcatttcccttgaatttcagggagcaggaccattcttcgctgtggggcgggcgctggacatcgatctcgaaccggataccggccttcttgtttaattggtaaagaaccgcaatcacatcagacaggctgtccagctggatttcgggtttctggtagccaatcaggtctgccggagatatgtttaagattttggcgatggcattgatcatcgctatggatggctcaatttcaccgctttcgtatttttgaactgtgcgcatcgtcttgtccagacgctgtgccagctctgtttggctcaagtgagcggccttgcgggctgccttgattctctcgccaatttcagctgggttgctgtgcattgtcatcacctcgcttgtattgtaacacgaagttgtgcgaattacaaggtcgtaatgcgaataattttttcgcatttagtgttgacaagcggtcttgaatggcttataatcagaatacgaactaacagttcgtatgttagcaataaggaggtcattcacatggagaagaaagtttatgtcgaactgccgcccttcaccggacgcaatgtccccatcaccgagattgcagtcgccatgcacaaggatgcccagtatgtgcgcattggcttgcagcagggaatcctgaaattcggctatgcgatcaagctggagaactccaacgagtacaactactactgccccgacagaaaggtgtgggaggaaattggatacttccagccggaaactgcataaaaaaagagccctcatcctggcagatgaaaactcttggcggacagtacaaacggcagctgccgtgtgactatcactcagcaaggatattataacacgacagctgccaaattcaacaattatttgaggaggaacagaatttgacagctttaccagacagcatcatacaaaatggtctgttctgctgctggaagtacgaggaacggaatgggcggaaaacgaaggtaccataccagccggaaaccggcctgggagcgaaaagcaacgatccttccagcttcgtaccttataaaacagcagtacaggccagcggatatgatggcattggaattggcattttcaacggcatctgtgcgattgacctggacaactgcctttcggacagcggctattacacccagaccgccgcagaaattgtggccttaatgcacagctataccgagtacagccccagcggcaacggtctgcatattctcttttcggcaaaagggtttcagtatgataccaagcgattctatattatgaaccatcaggccggaatagaggtttatgtggcgggagtaaccaacaaatatgtcaccgtgaccggaaaccgctatgaggattatgagtatggtgaccggacccaggagttgcaagcgttactggacaagttcatgcgcagaccagaggtaggtgcagaaaatgcaataaatgcaaaaaactctgatttaagcatggagcagcttctgcaactggcaaaaagcagtaagaatgggacagcgttcacagccctttggaacggttcgttggagggatattcgtccccatcagaggcagatctggcgctgtgcagtcatctcgccttttggacaggacgggatgctgtcaagatggacactatgttccggcagtcgggtttgatgcgggataaatgggaccggcagcaatccggcacaacgtatggtgcaatcaccattcagaaggcaatcgagcattgccgggaaatctacactccaaaagcggagccgtcaacggtttttcaacctattgttccgctgatgccacagtggagtgatctgcctgcatttccggtagacgctctcccggatgtgattcggaattatgtgagtgcggtagctgaacacagtcagactgtcccggacatggcagcggtgatcagcctgggtgtgctggctacctgcttacaaggaaaatataggatagagggaacgccggggtactgtgagcctttgagcttgtacacagtggtgatcgccgcaccgggggagcgaaagtccagcgtcatgcgggatatgactacattcctttatgagtatgagcaggaatataacaaggcgcacagcacggaaatacgggaaaaccattcgcagcgggaatctatggagcgccagatctccggtctgcaaaagaagctggagcgcaaggaaagccgggaaatggagttggagctgcggcaacttcaggagcagctggaagaaacgccagaacgaaagccggttcgcttctttgcagatgactgttccagcgaagcgctgaccagtttgatggcagctaacaatggggtgttctccgtgatctccaccgagggcggcatctttgacatcatggcaggacggtattccaacaaatctaacattgatgtctggctgaaaggtcattgtggggatgccatttatgtggatcgaatgacccgtgaagcagagtgcatcatgcacccggcactgtcagctatcctctcaattcagcccagtgtgctggacgaaatcatgtccaataccaccatgaccgggcggggcttgattgcccgcttcctgtatgcgtccccgccgtccagaattggcagccgggtctttcgtacccagccgattcctcccgaagtaaccgcagcttaccgtagcttgatttttcgcctgatggctcggccgattggtggggatacccagacagtacacctttcggaaaaagcctttgacctgatggccgattattttcaggagcatgagaagtttctggttggtgagggacaggcaatttccgattgggcaagcaaatatatcggtgccgtactccggattgcgggactgttgcactgtgcagatatggaagatgacaaagcagaagtaacagcttctacgatgagcaaggcgattcagatcggcaaatactttctggctcattccacctacgcctattccatgatggggactgacttaaccatccagaaagccaaatttgtcttggcaaagctgaaaaagaagaacgtatcggtgatcaaacgttctgagctttttcagatgtgccgggggaagttctttaagaaaacggaggagatttttccgacgctggaactactggaggggcatggatacattcggctggaagaaccggaacgccaatcggtgggtagaccagccgatgtgaaaatcattgtgaaccccacagcatgaaaccggaattttctgcatttattgcatttcctgcacagagttatactctggtatcgcaccaccgtccccatcgaaaaatccgcagatttggagatggatggttcgggagaatccggtggattttcccgaaccgtgagcggcaggattgcttacagaagcaaggatgccggacacacctgacttgctgtgtggatagcacacgcaagtcagggaggctcccgcaggagccgcatccccctcggagagcccacgatactttgcagccgcaggatgaaagtatcatagtgggttattacacttccgcaggaagtgcgccccggcccgcaggccgtacaaacgtgaaaggagctctatggcgagaaacgacgggattgaccgtaccagtgcaagaaacgcaaacctgaccgccgccaaaattggtaatgcccagcggcacaatgaacgagaaaaagaatcctataccaacccagatattataccagaacacacatctgagaacatccattttaagaaacctaccgccggatatgcagaaatgtttgctcagatggaaaaagacggtgtaatctccacccgtggtctgaaatcagacgccaacctttacggggaactgatttttgatgtaaactccgcctacttttataaccatgggggatatgagtttgccaagcaattttatgaggatgcttacaaagctgccatagagatcgttggcggcgaacagtatattctctccgctgttatgcacgccgatgagcgtaaccgggctatgtccgaagcactggggcaggatgtattccattatcatctccatgtggtctatgttccggttgtggagaagcagatcctctggtccaagaggtgcaaagacaaatcacttgtgggaaccgtcaaggaaacaatcatgcaggtgagcagtagcaaaaaatggctgtccaaaccggcattggacgaacagggagtgcccattctccagaggaatggcaagccggtgctacggaagtcttacagcgtcctccaggatgatttcttccaagccatacgcaatgccggatatacggatgtggagcgtggagaacgaggcagctccgaggaacacttgactgtgacgcagttcaaggtggaacgggaacaggagcgattggaacaactcacagcacaaacgcagcagaaagagcaacatgcagcttctctggaaaagaagatcgagaatattcaaaaacagcagattgccgttcagaaagtggagcaaatagaaccccatgcagttccgttttcctctaaagttatgctggatcgttctgaatatgaaaatctggcagctgcggcaaagaagttctatgtccaggagcgcaaggaatccaagctgcaaaaggctttggatgcagcgttgaaaatgataagtgagttgaaagcaaaggtcgccgcactgaccgcagaactggcagagtacaaatccgttcgggggcagcttcgcaccgtagacttggagaaggaaaatggtgagcttcgtggtaaactccgcaaatatgaagatgtaatttctcggcataatttgtggtcgtatttttcacagcatagaagaagcgagattgatagaggagagtcgcgataattaacaaacaggaggttgggttttcacctggcctcctgtttgtcaaacaaggcggagaaatatcttatctacagctataaaacaaagatggagccagtctaagtttgttgatttatggaaatgagcttggtaaacgccatgagccgggagttcacgctgcgaacctatgtcaatgaagttaagaagaactatgacacggttctgattgactgtatgccgtccctcggtatgattacgatcaatattgaagctggcgtcattccgaagtttgcggcctgtgcctctcagggtgtgccgtggttccaggagcgcggactgtggcaggacaacagctatgagccgcgccctggcgacattatctttttcgattgggatgatggcggccaggatggttcttccgaccatgttggtatcgtggagaaggtggagaatggccgcatctacactatcgagggtaactccggcgatagctgccgtcaaaacagttacccggttggttactatgaaatctatgggtacggaaccccggcgtattaactgaccaaaagaaaaaaccagccgtttctggttgggtacataaaagattcacaaaaaacaagttgaaagacttcgtttatctggatataataatatcatagatgtttcagcggaataagaaaaccgtggagggaacagtggatattatgtcagtaaaagaagcgtctgagcggtggaatatatcagaacgctggattcagaagctctgtgaagaagggcggatcgaaggcgtgcagagatttggccggtcctggatgattcccaaggaggcgcaaaagcctgctgatttaagaaaaaacagaaaaggaaggagtgatatttcccatgtataaccctcaattggaaaccttcctgtgtgtagcagaatgcggtagcttcaacaaagctgcggagaaattgtttatttcccctccggcagtcatcaaacagatcaatctgctggaggaaaatctggatctgcagctttttgtgcgcacccatcgtggccttcagctgacggaggctggtaaatctttggcacaggacgcaaaatacatcatccaatattgcaaagattcggtgaccagggcaaaaaatgtcatgaaaaagagcgaagacatcatccgtatcggtacatcatccatgacaccagctcaggttttggtggatctgtggccaaaactgcaggaagagtgtccaggagttaaattccaactggtgccattcgacaatacacccgagaacgcccgggagattctggccaatttgggacagaacattgatgtaatagcgggtatctttgatgaaacaatgttgaacctgcgccgctgtgccgggttggaaatttcaagggaacctatctgcgcggcggtgtccattcatcaccggctggcgggaaaagacaggctcaccgttcaggatctgtatggcgaaaaattcatgatgatgcgtcgggaatggagccactatgtagatttgctacgagatgatctttggaaaaaccatccgaagatccaaattgtggactttgacttttacgatgtgaatgcctttaaccagtgcgaaaacaacgattgtgtgctgatggcggtgtccaagtggcagtacgtccatccgcttttgaaaatcctacccgtggattggagttacacaattccctatggcctgctccattcaccagatccttcccctgtagtcaagcagtttctaagggcggtgcaaaaagaaactggacgggacaagtgataaccaaaaggtaaatactacataacgaaacgagacttctgtggaagtctcgttttttttataatgaaatcagaaaaggaagagaggcaggtgacaaaatgaaggtgcaaggaattctggtagctacggtttgtctgttgctgtgcctcgcaggatgttcgggtcctggacaaacagagacaacttcttccggtgaatctcactcggcagagagcaccgcacctttggatgatgcagattttcagcaggaatcagccggctttgcgcctacggatcaaatgacagagccatttactgtatccacccccattcaagaagtgatggatgaccccatttttggaagatacggacgcttgctttttccagtggaggattggtatatgagcggcgatacattgggtgaactgcaactcacttggtacaacaacatcgacccaaatgaaaccgtagagattgtcaataccctgtggcagcgagccaacgctggtgaaactgttttctacgatatttatacagaagaagaaaaagcggaggatccggataaagaggatacgggattgtttttcttcaaaggcgatcccggagccaaattcgccgtatgtaatgcgggaggcggttttgcctatgtgggcgctatgcaggacagtttccctcatgcgctggaaatatccaaacgaggatataatgcttttgctctcatctatcgccctggagcccaaaccgcctgtgagggtttggcaagggcaatcagttttatctttgaacacgcagaagaactggaagttgatacggaaggatactctctctggggcggctcagccggagcccgtatggcagcgtggcttgggtcctatggcccggcggcatttggaggggatgatcttccacagccgagtgcagtaattatgcagtacacgggccacagtgattatacggaaaacgatccaccaactttcgcctgtgtgggagaaagcgatggcattgcaaactggcgaaccatgcagcggcgtatagaagcgctggatgccttggggattccaaccgaatttcaccactatcccggcctgccccacggattcggattgggaaccggtacggtagcagaaggatggttggatgaagcgacccaattttgggaagcacaaatgtgagcatcctgttgattgaacataaaacattttacagaaaggaaacatcattatgaacaactttatttttcaaaacagcacgaaggtctatttcggcgagggttgtgtgaaagagtatctggcctgcctgaccaaaaatgcgcagactatcctgttggcctatggcggcggcagcatcaagcgcaatggtgtctatgatgaaatcacaggcattctgaaaggcgctggaaagaccgtcgtggagttttccggcattatgtccaaccccacctatgccaaggtacaggagggtgcaaaactggcaagggaaagtggggctgatatgattctggccgtaggcggaggcagcaccatggactgctgcaaagctgtctctctggctgcccggtatggaggggacatctgggaggatttctgggctcaccccggcgtcatcgactttgatccactgcctctgggtgtagtcgttactgtggctggtactggcagcgagtgcaacggcggcgcggtaatcaccaatgaagagagaaagataaaaacagggcgggattatccggctctcaatccccgatttgctctgatggaccccacctataccttttctgtacccaaaaaacagatggcatctggtagctttgacatcctcagccacatcatggagacctatttcagccagcccaatgaggacaatgtttccgatgacatcatggaggcactgatgcgtagtgtgatccgaaatctgcgtgttgccatggacaacccggaggattatacggctcggtccaatctgatgtgggattccaccatggcggaaaaccgactcatcaagatgggaaaaaagtgcgactttgaatgtcacaacatggagcaccagctgggcgcttataccaactgcaaccacggctgtggtctggcggtgatccatccggtgtattaccgtcatgtgtataaggaaggcttaagcaagtttgtccgttttgccgaaaatgtatggggaattgagcgggatggaaaatccgatgaagcgttggctctggacggtatcgatgccctttccagcttcattcaagagattggcttgccaactaccctcaaggagctgggcgcacaaaaggagcaactaaaagaaatcgctgattcctgtggtatttcccagggcagctataagcctatgacccatgatgagattctggaaattttccatgaatgctatgaataagagccccgattaatacaggaaaggaatgatcattatgaagaaactgactgcaattttcttgtgctttgcaatggcgttgagcctcgctgcctgtggaaacagttcgtccaatgaaaccagcgccccggaaacatctgactccgctgcttccagcgaaacgcaggaacccagcgtagcgccggaatccgcagaacccacagagtccacagaagaaccttcctctcagccggaaacggaaggcgaggaaggaggaaccctgatcgcctatttcactatgccggaagatgtagaggataactaacaacacgggttgcctcatgactatccgtatagcagtgggttcttccgctttcggggagagcctgctcttttctgaaaatctcaaggaaatataccggaatccgaagaagttaaaacctttgacttatcactccataaccaatggagacttctgtttttttcgcaatggattacaatagaatcacaaaggagagaaagatgatgcagatgagaacactgggcactgatttgaacgtatctgctgtaggcctggggtgcatgggcttttctcatgcctacggtgcgcctacggaggaagcagaggctgtccgtctaatccgtcgcgcctttgatttgggctatactttttttgataccgctgaggtgtacggtaccgccgccgacccccatgtaaatgaaacgctggtgggcaaggcactggcagatgtaaagaatcatacggtaatcgccacaaaatttggcctgcggtttgaccaggagagcggaaaggttccattgcctctgatggaggattcccgcccggagaccatccgcaaatctgtggaaggatctttgaaacggctcggaaccgatcacatagacctgtacttccagcaccggattgatccgggtgtagagccggaaacggtggcggaggtgatggccgatctaatccgggaagggaaaatcacccactggggcatctcggaggcaaatgaagactacctgcgaagggctcatgccgtgtgcccggtgacggcggtacagaaccgatactctatgatggcacggcattatgaaccgttattccccattttggaagaattggacgtgggcctggtggctttttcccctatggccaatggttttctcaccgggcaatatggcaaggggcagcgctttgatgccgccaccgattaccgtgctgctatgccccagttcactgacaaagctgtggaccaaaatgccgcacttttgaaattgctcacagatatggctgcggaaaaaggagcaacctcggcccagatctccatggcctggatgttgtgtaagcacccgtggattgtacccatccctggcactcgcaaggaagatcgtatgaaagaaaatgctgaggccgcatctgtttttctgacgcccagtgaggtgcgcgctctggacgacaccctggatcatatggatatgtctgcggtattcggtggaacgcctttaaaataaacggaaggagcatactcatgaacaaaacactacttgatatatctcggcagttttgggaagctatggaacacgccgacgaagtggggatgcgggcctgtgctcatcctgactgcaactttgtccatattggcatcacctgcaaactggacaaggaaatcgaattttacaccagtggggcctttcaacctacgaatattaccttccacagtcagaaggctgagttgtttggagataccggagtggtgcttactgactgcgattacagcctactgctggacgggaaggaaaccactcaccactttatggtgacggaagtgtacacccaggatgaaaaaaggtggaagttggtcactttttcctttacggcattggtgtattgaaccgccagccacaaattttggtaaacactgtttgtatcggtacaaacaagcgatcactttttaggaggatttatttatggaatatgcaaccttgaacaacggaatcaaaatgcccatggcaggcattggcacctttttgcttaccccggatgaagcggagacatccgtcctctccgctcttcagtgcggataccgcctgattgacacggccaatgcctatgtgaacgaaaaagccgttggccgggctatgagaaaatctgggattccgagagatgagatttttctggaaaccaaactgtggcccagtttttatgagcaggaagatgcggtagaaaagacgctccagcgtctgggaaccgactacattgacctgctgctgatccaccagcccgcaggcaactatgtcgcaggttaccggctcatggagaaagcctacaaagagggcaaggtgcgcgccattggcctttccaactttaccccggagcaggtgcaggagattctggacatctgcgaagtaaagcctgcagttcttcagacagaagtgcatccttattctcaggaaaagaagctgaaggagttcctggataaagaaggcatcgtcatccaggcatggtatcctctgggtcatggagacaaggcgctgatccaggaaccgttgttcacggaatttggcaaaaagtatggcaagagcaatgcccagatcatcctgcgctggcacattcaggccggcaatatcgtgatacctggctccaagaacccggcccatatcaaagacaatttcaacctgtttgactttgcgttgacagatgatgaaatggctaaaatcattgctttggacaaacagaagcgatattacaccagtacaccggaaatgctgaagaagtatgcggaaatggttccgcctgtagacgagcagaaataaggaggaatttgcaatgcgtaagaattttggaacaaaatcctggttttatccgctgccggtgcttgtgatcggcacctatgatgaaaacggcaatcctgatgccatgaatgccgcatggggcgggctgtatgatgcggacaaggtagtactgtgtctgagcgctggtcataagaccaccaagaatatccgggcaaagggagcgtttaccgtcagttttgctgacgttgcccatgcggtttctgcggactatgttggcatggtgtccgcaaataatgagccgaaaaagatggagaagtctggcttccattgcaccaagagcgaatcggtggatgcgccccttatcgatgagctgccggtagctctggagtgcaaactcctgaaagtgagcgaggacggcaacatcatcggtcagattgtgaatgtgagcattgacgaaagcgtactgagcagcgatggaaagctggacatggacaagttccggccgatctcttatgaaccggcaaacaacggctatcatgtgctgggtgagcgtgtgggcaatgcgttcagcgatggcggcaagttgaaataaggagcgaatgatatgaataaggaatttcacaatctgttcccgcagggcggtcccaacacggtggccgggcagtatttcagtggggccagctatctctgccctttaagcgacatgggcgtgcctgtttccaacgtgacctttgagcccagttgccggaacaactggcacatccaccataacggcggtcagatcctgctttgtacggcgggtcggggttattatcaggagtggggcaaatccgctcaggaattgaaccctggagatgtggttaacattccgcccgaggtaaagcactggcatggggcggctccggacagttggtttgcccatatagcgatttccgttccaggttccaaagccgagtggctggagccggtagatgaagcagaatatgctaaattaaaataaatccgatagaaaggatgggattatcatggataaagtaacagcaggcagagatgccatgagcaaatttgcccctaaatttgcggaattaaacgatgatgtcctctttggagaggtttggtcgcgagaggataagctctcgccccgtgaccgtagcctgattaccgtctccgccttgatggctagcggaattctggatacatcccttcttcatcatattgagcgggccaaggccaacggtgtaaccgccaccgagatgagcgaggcattgacccagcttgctttctatgctggctggcccaaggcgtgggcggctctgcggatggcaaaagatgtctatggagaggaataagatggaacgcccttttgttgtgtgccatatgctcacttctctggacggaaagattgacggtacgtttttcggtgtgcctgaaacagttccggcgataaaagcctatggggaactgcgaagtttttacggatgtcaggccaccttatacggcacaactaccatgctggggggttatgccgagggaaaggtggggcagctacccactgtgatgtccactccgccccgagcggattgggtaaacccgacaggcaaggccatgggcaatttcattgttgcagtggacccacagggtcagctggcctattccggattgtccatcgaaaaaaagggccgccccgccgcccatgtgatcgaggcgctgatggagcaggtggctccagaatacctgtcttatttacaggatcaaggggtttcctatctgtttgccggcgagaaacgactgaactgcactctgcttttggagaaactgcatcgactgtttggcatcaacaaactgatgctggcgggcggcgggatcgtcaatggatcgtttttggctgaaaatttggtggacgagttgagtctagtcattgccccggtagccgacggcggcaacggtgtcagttcctttacccaagttgattttctgccatcctggccaccgactgcatttcatcttaaagaggtgcagacagttgtaccgaatgtgttatggatgcgctacacccggccataaacgggcatattcgtctaatcaatagaatgattttacaaggcaaggtatctgtttcaacaggtaccttgttttcgtattagtggaaagctaaaggttaatactttataacgaatcgagacttctgtaaccttacagaaacctttacaataaaatcagaaacaaaagattatccaggcaatgcctggataggtgttgtgaagccacagaaaggaagttatccatgatggaatatgtattattgaataacaacgttaaaatgccaaaactgggatacggcgttttccaagtctcgaacgaagaatgcgagcgctgtgtactggatgcaatctcagtggggtatcgcgcgattgataccgctcagtcctacggaaacgaggaagcggtaggcaatgctatccagaaatgtggcgtacccagagaggaattgttcctcaccagcaaaatctggatgtccaacgccagttatgaaaaggcaaaggcatccatcgacaaatccctgcacaagctgaaaaccgactaccttgacctgatgctgatccatcagccctttggagattattacggtgcataccgagccatggaggaagcatacaaagagggaaagctgcgggctattggcgtgtccaacttctacccggaccgactgatcgatctgtgtcagttcgcagaaattgcacccatggtcaatcaggtggaaacccatgtgtttcagcaacagcgaactgcgcacgaatacatgaaaaagtacggtgtgcagcacgaggcatggggcccctttgccgaagggaagaaaaactgttttaccaaccctgtactaattgaaattggcgaaaagtacggaaaaacggctgcacagactgccctgcggtttctgatccagtccgatgtagtcgtgatcccaaaatccacgcacaaagagcggatggaacagaacctggatgtatttgacttctccctgagtgaagcagatatggaggccatccgcactctggatgaaggaaagagtctgttctttgaccattacgatccttccacagtggaaatgctcaccaatatgggcaaaacgcgaatcgtataaagggggaaagcccaatgagcaggatgcagcctatctccacggagcatcttagtgggatggggactatgcgcccattgcggaaaatggcacggctgtctatatttttatggcagaacatgatgagtattatggttcccagcgggcatggagtgcttacaacagtctccatgatgcctatgaagaagctggatggagcgaggagcagatcagcaatgttcttcagatccagacaccaaatgacgaatggttcgctcagcggggcgttaccggcaattatcatggcggcggaaatgtggtttttggggaagatgatgttttaaaccgggtcttgtctcacaccaaggaggagaatgaatcatgaaggtattgcttgtaaatggcagccctcaccgggaaggctgcacctatacagcactgtgtgcggtgtcggaggcgctcaatcagaacgggattgataccgatacgttctggattggcaataagccgatttccggctgtatcgcctgtcacaagtgcaatgaccgcaatcgctgcgtgtttgaggatacggtaaacgattttttgtcattggcagaagattatgatggctttgtatttggaacgccggtccactgggcaggagctaccggtgcaatcacttcttttctggaccgtgctttttatgccgatttgaacggaggcggcagacgattctatttgaaacctgcagcggcgattatgtcggctagacgagccggaacgacggctacatgggatcagctgaacaagtattttggtctgatgcagatgcctattattacgtctcgttattggaacatggtgcatggaacaacaccgcaggaagtaatgcaggaccgtgagggccttgcgactcttcgaacactgggccataatatggcttattttctcaagtgcaaagaggtaggcagcaagctggtgcctctgcccccggaagaaccgtgggaaatgacaaatttcattcgataaggaaccaataaaggataggaggtcaaccccaatgaaagcaaaacgattggaaaaatcatcgtggatcttggcatgaccgtccttctgatgctgcttatggcctttgaacggattggcaaaacggctcatgaatggatcggagccgggatgttcgtgttgttcaatgccccgcctgcgggtttttgttttaaaacaagcatcacccccgctccgcacaaaacggaacgggggtgatgctatttataattctattttactccgcaatttctgcactcagcaggtctaaaatcgcgtcttccgcgttccagaagtacgcggtttcaccgagaagcaccgtgatgcccgtgcggtcaaaataggtgcgcacgccgtctgccatgccgcagcaggcgaccgttttgccttgcttttgcaggctttcacacagctccaaaacggcctgcgcgccggaaacgtcaatattcggcatgccgcgcagggagaagatcacatggtcgtaggcgggcatttccgccatgcggcggttgaattcatccaccgcgccgaagaacagcgagcctgtcacgtacacaacgccggtcgtctccagcaccggcggcttgccttccaccgtgcgcagcttattcgcgtcaatgtcggagaagcttacgccaatccggctggattttgcaatgtacaaaatcgcagagtacgcaacaccgagcaaaatcgcgaccgtcaggtcaaagatcaccgttgcgagcatcgtgacgaggaactggctgatgccggattttagcttgtggctgaaaatatagcggatgccgccccagtcgttcatgcgccacgccgttaccatcaaaacgccggcaagtgccgcaagcggcaggcgcgccatcacgccgccgagcagaaacatggaggcgagcaggaaaacggagtggaacacgctcgcaaggcgcgtctgctggccggatttcaccgctacgctcgtgcgcgcaatggccgccgtagccggcacaccgccgaaaagcggcagcagcatgttgcctacgccctgtgcgatgagctcttgatcggcattgaacggctcgtttttcatgcgggaagccgaagcaccgcacaaaaggctttcaatcatgccgagcgctgcaatcgtcacaatgggcgagatgaggtttttcagtatgtcaaggttcaggctgccgaggtcaaggcggtcagcgagcatcagcgtgcgcggaatgtcgcccaccgtcgcaatggaatccatacggaacagggcggaaacgaccgttgccaaaatgatgcccacaagcgagcccggcacgcgtgcgccccactttttcggccagacaatcatcacgacaacgacaagcagaccaatcagcaccgcttggaggttcggatgaaagccgaggcgcgcgtaagacgcgatttttgccaaattcgagctgccctcggacgcagtgccgaagagattatcgatttgccccatcgcgataataatcgcaatgccggacgtaaagcccatgatgacgggcatcgggatgaagctgatgagccgcccaagcttaaaaataccggctaaaagcagcagtgcacccgccgcaaagcacgcgaaaaacacgccctgcaagccgtaagacgccacaatacccaccaaaacggcgctcatcgcgcctgtggggccggaaatctggaacgaagcgccgccgagtaccgcaatgacaacgcccgcaatgattgccgtaacaagacccgcagctgccgtagcgccggaagatacgccgaacgccagcgcaaggggtagcgccaccgcgcaaacagtcaggcccgccatgatgtctttcatcagcttggcggtgttgtagcccgaaaactcctgcttcaggctcgttaaatagtcttttatcatgtttccctccaataaattgatttttccgcatcatttgccgctttttttgccgcagcctattaactataccattaggagccgctttaatgcaaggaaaaagatacgccgttttctcgcgcttttctgtgcatacagcccgcgtgacacaccttataaaaatctttactttttataggaaatacgctatactttgtacaaaagcaaatgcgaaaattccttgttttaatccaaacaaagaggtatgaaaatgaacgtgaaaaaaacggaaagagacggcattgtccgcgcctatcccgaaaacggcaagccgctcgcgtggtctgcgtcgtccggcgtagagctcatcgaaaaagacggcctgtattttaaagacttggagaagaccggcgagcttctcccgtatgaagattggcgtttgcccgttgaggagcgcgccgcagaccttgcatcccgcctgacaacagaggagattgcgggtcttatgctctattcgccgcaccaagcggtgccgcccatggcgttcggcccgttcggcggtacatataacggccaaaagtacgcggaagcaaatatccctgcgtatacgcttaccgaccagcagaaggaattcatgaacaaagagcacattcgccacgtcctcatgattacggtagaagacgcgaagactgccgcaaagtggaacaatgagctgcaaaagcttgccgaaagcatgccgcacggcatcccggtgaacatttcctccgacccgcgcaacggtgcgcgcggcagcggcagcgtagagtttaaaaccgccggcagtgacgtcagcaagtggccggagggtgtcggttttgccgcgtgctttgaccccgaggttgtccgccggttcgcggaggatgcgtcgaaagaataccgtgcgctcggcatcaccacggcgctcggcccgcagattgacctttgcaccgagccgcgctggatgcgctttgtcgatacgctcggtgaaaatcttgaaatgacaaagaaaatggtcaaggcgtactgcgacggtatgcagaccaccaagaattccgaaaacggctggggatatgacagcgtaaacaccatggtcaagcactggccgggcggcggcacgggtgaggccggccgcgatgcacactatgcctacggcaaatacgcggtttacccgggcaataattccgaagaacacagaaaaccgtttacggaagcggcgtttaaattagacggtcccaccgaaagcgcctctgccgtcatgccgtactacacggtttcttggggcctcgacaccaaaaacggcaaaaacgtcggcaactcgtacagcgagtatctcatcaaagatctcctgcgcgaaaaatacggctttaagggtgtcgtttgcacagactggggcatcacgcaggatcccgcacccattatggatacgtttgcaagccgctgctttaatatggaaaacatgaccgagggcgagcgctgcttcgtcgccatcatgaacggcgtagaccagttcggcggcaacgcagagattgcgcccatcatggaagcgtatcaaatcggctgcgaaaaggtcggcgaagaagccatgcgcgccagaatggagcgctccgccgcgcgtctgctcaaaaatattttccggtgcggcctgttcgagaacccgtatctcgatcccgaagagtccgccaagattgtcggcaacgcggaattctgcgcccacggctatgacgcacaacgcaaatctgtcgtcttattaaagaatcgcaatcactgtctgccgctccaaaagggtatcaaaatctacgtgccgcagcgcaagctccgcaccatgaagggcttcatgcgcaacgatattcccgcccacacggaagaccccgtgacggacgaggtgatttcgaaatacggcgtgcgcgtccatacgcccgaggaagcggatgtggcgcttgtctttgtggaaagccctgcgtgcaacgcgtattctacggaagacgtcgcaaacggcggcaacggctacctgcccatcacactccagtaccgcccctatacggcggtgaacgcgcgcgaagtgagtattgcgggcggcgatttccgcgaggatttcacgaaccgcagctaccgcggcaaaacgaacattgcctataatgaatgcgacctcgataacattctaaactgccgtaaagcgatgggagacaagcccgtcattgtctgcgcagcgattaacaacccaatggtcatgcatgagtttgagcgtgaagcggacggcatcgtcgtcgagttcggtgtttcccgcgccgcggtgctcgacgtcgtcttcggcgattacgatcccaccggccgtctgcccgtgcagatgccgaaggacatggacaccgtggaaaagcattgcgaagacgttccgtttgaccttgaagtgcacgtggatgaattcggccacgcctacgactacggcttcggcatgaattatgaaggcgtcatcaagaaataaggagcgacatctaatgaatacagtagaaaaatgggggctttttgaagtttccctcaaaggtccgtctgcgggcaacccgtttacggagcagtccgtttccgccacgttccgcagcaaaaacgagatcgtcacggtagacggcttctatgacggcgacggcgtttataaagtgcgcttcatgccctcgtttacgggcgattacgtctatgaaacggtcggcagcttcccggaagcggagtctgccggcgatttcaccgtaacggagccgaccggcaataaccacggcccggtgcgtattgcgaacacgtaccatttcgcctatgaagataccacgccgtactattccgtcggcaccacgtgctacgcgtgggcgcaccagccggaagaagtgcacaagcaaacgctcgaggagctcgataagggctacttcaacaaaatgcgtttttgcgtctttccgaagcactacatccacaatttccgcgacccggagacctttccgtatgagggcaccccggtcgataattcaaacctcaccgaagaaaacttctcgtatttcgtcgatttttccggcaacaactgggattttacgcgttttaaccccgagcattttcgccgcatggagcgctgcatcgtagaattgcaggagcgcggcatcgaggccgacatcatcgttatgcacccctacgaccgctggggcttctccgccatgaaccgcgagcaggacgacctctactggaactacgtcatcgcgcgcttctccgcctaccgcaacgtgtggtggagccttgcaaacgaatacgacctcatgcgcgccaagaagcttgaggactgggagcactacgcagacctgctctgcaaaaaagatccgtacaaccacatgcgttccatccacaactgcataccgttctacgaccacacccgtccgtggattacgcattgcagcttgcagcgccaggatctctaccgtcacgtggaatacaccaccgattaccgcacgcgctaccaaaagcctatcgtgtgggatgagattgcctacgaaggcaatatcgatatgggctggggcaatatctccgggcaggagctcacccgccgcttctgggaagcttccatgcgcggcggctacgcaggccacggcgagaccttcatgaaccccgaagacatcttgtggtggagccacggcggcaagctgcacggcgaaagtcccgcgcgcatccgcttcctgcatgaaattctcacgcagacgcccggtctcggcttaaagcaaggccccggcgcatttgatgagaccgtcgccgtgccggatgagatgatccccgtcaccggctacgagattcactactacggcttcggccgcccgagcttccgcgatttcgtaaagcccgcgggcgaaaactggcgcgtggaggtcatcgatacgtggaacatgaccatcaccgatgccggcgtgcacagcggcaagttccgcattgcgctgccgggccacgagtacatggccgtgcgcctcacgcgcgtgtaaacattcataaagcgtataaatttagataaaccgtaaaagagggcacccgcagcgctgcgcggtgtcctctttacttgacagaatctttcccgcgccgtacaataaacccaagataacaaagaaatattccgaaaggatgactatattttggcgaataaaagaaaacgccccgctgctatgcgcgaggaagagcggcaggcacagcgcgcagccgcccgtgcggagcgacgcacaaggcgagccgcagagcaggccgcacagaatgtcccgcagaagacggaagctccgaaagcgccgcgaaaagcaggcgtgcctcataaaaagaagaagatcaacaagttccgcgtggcggttgtctgcaccgccgccgtgctcgtggcgctcgttgccctcggcgtggccagcgctgccggtgtgcgcacacccatcagcagtatcgccgcagacggcgaaccggagttcttctccaccgtaaaaccgcaggccagcgctgtaccggcagaaaacaccgcttccgccgcgcctacgccgtcttccgctttcgacggcgcgcttttcatcggcgacagcatgacgacgtgcctgaaaaactacgtcacggacggcgcaggcagcaccaccgctttgagcgacgcggaattcatgacccgcagcgattattcgtggggcgaagcgcaggacgaactaaacagcggtgagggcggcctgtggctcgacgatgacaccgctctcaccgtcacggaagccatcgaccgtttctccgcgacgaagctttacattcaactcggcaaggaagacctcacgtataacgacgtctccgacgtcacgtccactgcgcaggcggttatttccgcgctgcaaaagaagtacccgaaccttgaaattaccgtgcaggccgttacgcccatgctggagtggattgactatcaggggctcagcagcggcaccatcgcgcagtataacgaagcgatgcagacctattgcacgggcaaaaagaacctgaagttcttaaacatcgccgcattctgtacagagggctaccttcccgcggagtattgcgctgaccccgagggcttgtgcatccacttaaacgacgagggctgcgccatttgggcagattatctcctcggcaacaaaacgccggagccgtcgcccacccccacgccggcccccgatccgaacggcgacagcaccgataacaccgatacaacggacattgccgacgacacctacacggacgattccggcgattatacggacaacacaggggattacaccgatgatacaggcgactataccgacgacaccggtgattacacagaagaataacctacaaaatatggtatgcaaaatgtttggcataccatattttgcttttttcaaaacttattgaagtttttttaaaaaaaggcttgcaatttagaaagagatgtggtattataacaaagccgtcagataagacggcaaacagaatagttggtgttgattacaacgagggtccacctgttcccataccgaacacagaagttaagctcgtttgtgctgaaaatactcggctggcaacggcccgggacgataggttggcgccaacacttagaagaatcacagaaatgtggttctttttttatttttcaaaagctataagctccctctgtcagagggattttttcatttacgcttgcttttagctgtccgcgcagaaagcttgagcaaaactttattccttcaacaggttttacttcacgacttaccatattcagcaaaacaacgggaaaaaacgttttccgcggaaacatagtgccaaggaatattgacatattcgtgaatttattgtaaaattttttggagttctgttttttctcaatcacgggaaaaacgatagataaatggaggggcggagaccggcactttcctgtgtggccgcacgcgtacctcgaagaaaggtaagtgttcaaaaagtggaaaaaaccctgatttgtctgggcatcgctctggtcgtcggtcttctgatgtcccgcttggcaaagctcgtgcatctgcctgcggttacggcgtacctcgtcggcggtctgctcatcggtccgttctgtctcggcgcgctgaacattccgtacatcggcttcaattctctggagcaggtggagggcctcagcgtcatcacgcagacggcgctcggcttcatcgcgttcgccatcggcaacgagttccgcgtctcgcagctcaaaacgatgggtaagcaggccatcaccgtcggcattctgcaggcggtcatcacgactattgtggtcgatatcgccctcattgtcctgcatctcatcaatccagccctcctttcgctgccctctgccatcaccctcggtgccatcgccgcggctacggccccggcggctacgctcatggtcgtgcgccagtataaggcagacggcccgctcacaaagctcctgctcatggtcgtcgccatcgatgacgccgtgggcctcgtgctgttctccgtgtccttcggcatcgccggcgcactcgaaatgggcagcatcagtgttgtcagcgtcattttagagcccatcatcgagatcgtgatttccctcgtgctcggcgcactttccggccttgcgctcaactggttagaaacctattttcactctcgcagtaagcgtttgtccctcacggtcgccttcgtgcttctcatggttggtatctcctccatggaatttgagctcggcggcgtgaagatcggtttctctctgctgctcgtctgcatgatgaccggtacggtcttctgcaatgtgtgcagcgcttccgaagagctgatgagccgtctggatcgctggacaggccccatcaacattttgttcttcgtgctttccggcgcggagctcgatttaaatattttaagcaacccgctcgtgctgctcatcggcatcatttacatcgtcttccgttcgctcggtaagatctccggctcttacatcagctgcgctatgacaaagtgcagtgaccacatcaaaaagcatctcggcatcacgcttctgccgcaggccggcgtggcgctcggcatggcactcaccgctacgtcccttgctgacggcagcatcgtgcgcaacgtcgtgttgttctccgtgctggtgtatgagctcatcggcccgtctctcacaaagcgttccctgcttgccgcaggcgaaatcaagcccgagggcaagaccagcgcccgcgaggagaacaaacctgtaaagcccattaccctcaagtaatttcatagaatacaaaacgcaggaaggcaaagtgctttcctgcgttttttcgaaaaaagggagtaaagttgacgaatgtcaactttactccctttttaaacgtctgatgaagtgaatttgcttaatttaagcgtatgtagaaagaacaacagttaacttaacatttccgttctttccagcgtttgaactggcataaatttcaaatgatcccgaaacgtttttcaaaacaaacgaagcggcaccacccaaacttattgtgcgcggaccaattttgttgccagcactatcaagggcgtatacagatattgaggttggcccttcagaagaagtaaaacgaacaatgacaagttcctcgccaaaccaattgccgtcactcataacttggcgcgttgaagaagttagatatgttgtgtattctcgagtaaaagattgaggctgaacttccgagtttggagaaggaatgtcaaccgtttgtgcagaaatggaaatcggcagtgcaataacaaagatgatcgctaagaacagggatgtcatttaaattttaaaattcttcttcataactttacctccaaatgagattttgtgatattcgatgtacgattcatgtggtgagatggattgtgcattggaatcactcctatcttagaaaagacaaaattaaattttaattatgcaggtgttgagtatatagagcaataacaagtgtgccgggtaggcgatataatgaaaccattggcagtaagcttttccttttttttcgttgtaacttatgagcaacagaataccaattagtgcacatgcacattcaaggaagaaagatgaggtgtcatagcgaggatttagccattggaacggagcgtctaaagaacctgtaaattgtttgataaaagcatagtatataacaataaggatacctaaagaaataacggaagccgttttgttgtgacgccggtaaagaacataagggatgataatgcaaataacagcaaaacctccaccctcaacgtttagaatttctgctaaaaatacaaggagtagaacgggaatccaagctgcccatgaaaaaatttgctttttaataaaatcatagagtaagcaacagacagcaccgagtaatagagtaaaaagaatattgttgaaggcgaattttacaaaaccatatcgcaatgtgagattataaggaacttcggcaatgatagcaaatactaaaaggcggagacaataaaaaagtgcattatccgtatgtatacagccttgcgctataccgaaagcataaataggaaaagcaatactaccgatacattgcagcgcagtgacaacggggtaagaaacatcaggttctattttgaaataagtcaagagtatagtttgaacaggtacagccgcgtaaatatgccctaaaatcattgaaaataaagcagtccatttcaatttactccaagtcacgaaaaagcctccttttgcaaaattaggaatttatttattctgtgtattttataccataaaagaaaacttttgtcaataattttaaataaagtaaaaaaacttttatttaaatattccaaaaatcaatataaacaaaattgattgaagctaaaaatttgccttgaaagcagggaacaaatgtgctattatgatgaaaagaaattcttagggggcgttttgagtgcgcgttgtgattgcgatggattcgtttaaaggcagtttgtcttccatagaggcaggcaaggccgtggcagagggcgtacgccgcgcagacggcgcaatcgagtgcgtggtgtgccctgtggcggacggcggcgaaggcacgtctgcagcgctcacagagggcctgtacggcgaaacggtgcgcgtgcgggtcacgggcccactcggtgagaaggtcacggcggaatacggcgtcaaaggcgacctcgccatattggaaatggcacaggcagcgggcctgccgctcgtaccccaagataagcggaaccccatgaaaaccaccacctacggcgtgggcgaaatgctgcgcgacgcaataaatcgcggctgcaagcggtttgtcctcggcatcggcggcagcgcaacgaatgacggcggcgcaggcatgctgcaagccctcgggttcgatcttttggataaagacggcaaccccgtcccgttcggcgcagaggggctgcgcgtgctcgcgaaaatcgagaacaaaaatgccctgcctgcgctcaaaaactgcgtcatccgcgcggcgtgcgacgtcacaaacccgctgtgcggcgaaaacgggtgcagtgccgtctttggtccgcaaaagggtgctacgcccgaaatgattcgcgaaatggacggctatatgcgaaattacgccgcattgacgaaaaatctgtaccccgaaagtgaccttgatacccccggcgcaggcgcggcgggcggccttggcttcgcactcggcgtgttcctgcacgcagagcttatgcccggcattgagatcgtcatggaggaaacgcgcttagaggaaaaaatcaaaaatgccgatttcgtcgtgacgggtgagggcagactggacgcccaaaccgccatgggcaaagcgcccgtaggcgtggcaaagcttgctaagaagtatcacaagcccgtcatcgcgtttgcgggcggcattggaaagggcgcggaagcgtgcaacaaagccggcatcacggcgtttttccccgctgtgcgcggcgtgacgacattagacgaagccatgcgccccgaaaccgcggcggaaaacctcgccgaaagcgcagaacaggtctttcggcttcttaccctgcgataaggaggtacggtatgcacgatatttggaacccgtggcacgggtgcgtaaagtgcagcgagggctgcgcacactgctatatgtattttctcgacagtcagcgcgggcataacggcgcggaaatttaccgcacaaaaacgggctttcactatcctttgagccgcgaccgcgcaggcaactacaaagtaaaaagcggcgagcagctgcgcgtgtgcatgacgtccgatttctttttggagcaggccgatccgtggcggcgtgaagcgtgggagatcatggatcagcggcgggacatctcgttttttctgctcacaaagcgcccggagcgcgtagaaaaatgtttgccgtataactggggcgacggttgggagcacatctttttcaacgtcacatgcgaaaatcagcgccgcgcggacgagcgcatccccattctgcacagcctgccgtttaagcacaagggcatcatgacagcgcccttgctcggccccatagagattgaaaaatacctcgcgatggggcagattgagcaggttatctgcggcggcgaaaactacgacggcgcgcgtccgtgcgattacgactgggtgcgctcgctgcacaggcagtgtgcaaaccaaaacgtcacgttctgctttatcgagacgggcacaaacttcatcaaggacggtcggcggtacttcctgccgaataagcgcgtgcaaagcgaaatggcgtataaatccggcatatcgtatcagggcaagccgatgaaattcaagctcgaagacgattacggcctgttcgacgccgggcgaaaatacgaaaaatacttcggcccccagtgcgaaaaatgcggcagccgcataatctgcaacggctgcgcaaggtgcggtaaatgcactgtgctggaggggaaatgaaaatagaccgctgtatgtgcgtaatgcaaatcatacagcggtcttttaattttctaaaaagctatcgttttttcggggccccccttaatagggttccccgatttcaaatgtccaccggacatttgaaacgcctcttctgatttttggtaggcaaaagagtttcacttttggaaacggacaagcttttgaaaaagtttgagcaaaacttttaacccacgttgacggtcactttgttctttccgttttcttccgtcccgtaaaaatcgaaacgccgaagatgacgaaaagcagcagcaccgcaaagcacatccagctcacaaacaccgccgtgctcttgccgctgaacatatcgtagtagcctttcaggtaaatgatgaccacaatcagaggcagaatgtactgcatgtaaaggcggatccagtgcgggaacttaatgccctcgcctttgttcgcttccttgaggaaattctcaaagccccaaccgtttttgcgcacgcagaacagtacgaacacaaggctgcccagcggcagcagattggaagaaacaaggaagtcttccatatccataatgttgcttccctcacccagcggctgaatgccggaaagcacattaaagccgagaatcgccggcaaagaaagcaccgtgatcagcacaaagtttacgcccacagcctttttgcggctccaaccgccgatatccatgaagaatgcgagaatctcctcgaacaccgcaatgatggtcgaaagtgccgcaaacgacatgaagatgaagaacagcgtgccccaaattctgccgcccgccatgttattgaagagcgtcggcagcgtgatgaacagcagcgacggacccgagcccggctccaccccgtaggcaaagcacaccgggataatgatgaaacccgccatcagcgcaacaaacgtgtccagcagcacaatgttcaccgcttcgcccgtaatgcgatttttgcggtccagatagctgccgaagatctccatggagccgatgccgatggaaagcgtgaagaacgcctgcgacatcgccgcaaacaccgcgttgccgaagcctttctttgccacttcaccgaagtccggcacaaggtagaacttgatgcctgccgcggcattcggcaaaaatgcggagttcacagccagtgcaatcatcaaaagcagcagggcaatcatcatgactttcgtcactttctcaatgcccttttccaggccaaagccgcatgcaccgaacgaaataacaatggcgacaatcgcccagaacgtcagcgtacccggatttgtcagcatatcgccgaacacgccctctaccgccttgccgtccaagccgacaaacgtaccggttgcctccataaatgcgtatttcagcatccagccgcccaccatggtgtagaacatcatcagcaaaaagctgccgagaatgctgatccacttcatgcgatgccatttcgtgcccttcggttccagtgtatcgagcgccttgcccatgcccatgcggctgccgcggcccacggtgaattcgcacaccataatgggcagacccagcgccacaaggaacacaagatacatcaggatgaatgccgcgccgccgtatatgccggtaatgtatgggaatttccacacattgccgatgccgatggcgcacccggccgaaactaaaataaatcccaaccgagaaccgaatttttctctttctttcatacgttttcctcccaaattttttcccctgtatattttaaagaacgcatatttgcgttctaatcgggcgaggttatgtgcggaatgcgttcctttgccgcacaacttcatagaacatcacggtcgccgcaatattcctcactgcatgtttttcagcatggcgaccgcatcccgcacgtattccgagagcgtcttgtcctgtacgcccactacgcttacggagcagcggttgacgggaatcaggattttcttagcaacgcattcggaaacggccgccgccattttcggcgtgatctcgccccaaagcgcgtttgctaagataatgccgatgggtcccacgatgacgtctgcccacgtgcagtttaccacaacagggttttcgcctgtggcggcagcgtccgcaccggcgcgcagcatggcgcttgtggcaaggctgttcgtgcccacggcaacgacttccgcgtccggcatgttctttttaatctggtcggtcagtgccgcacccattttgccgccctgaccgtcaatcacgagtattttcatcaaaatcaaccctccgtaggttcgtttgtgtcgccgtccaaaacggcggaaacgggaagctcgccgtacatcagcgatgtgcagttgatctgcatatcgcccacggtgacgggcttgccgtccgaatatacctcaagcttggaaagcgtcatgcccgcagcttcataaaatgcacggaacgtctttgcgatggcttccagagaagacgtggagctggcggagtctaaatattcctgcaaagcgccggaaaactgcaaacgcacctccagcatttcgccgctcttcatcgtggagacaacctcgccgtctttaacgtagtcgagcgcgtccagcgtcacatcctccggaaatgcgcccttttctgccattttctgcacgagcaccgcaccgtctgcgggcaggctcttgtagctgtactggtcaaggccgctgtcgctcggcacaaaaatcgaaagcgacatgttcacggcttcgcgcgtgtcttcggaagcggtcggctccggagtcagcgtcacgtggctcacttcgctttctgcggcggacgagaccggcgtgtcgctttctaaaatcacgtccggcgtgcgcacgtatttcgtgccgaaccaccccgcgcgtacggcgacaacgcacaataaacagattacgatgacgcctacggccgcaaacggcatggcgcggtctacattgcgcttcagacgctttgcgcggctgttcgcggtaaaatgcgggtctttcgattcattcaaaacagaataatacacgcggtgcagaagatcgtccggcgtttccagggtttctacccattcgcgcaggtcgtcctcgctcatgtttgcgacttttttggctttttccagctgattttgcacggcagaagcggattttccggtcacgcggccgataaagcgcgtgttgtcacctgcaccgtagtgcagcgccaccgccgtcagcagcgtgtaatgcaggcgtaaaatgtcgcagagctctttcggcgtttcaaacggcatgtcttttgagcgctgtgcaatctgctcgtccgtcagtttttttcgaattttctgtgcataatagtccatgcaggtcttgtgcgttgtgcgcagcacccaaaggcgctcctcgccttcgcttttaaaggtttgcgtgtctaaaaagtactgcataaatacatcggaaagcagcgtaagcgtctctttgccgctttttgtgtgcatataacagatgcggaacgcgtcatcgccaaagcgcatcacggcgctttgtagggcggtttcacttcttgtctgtggttttgccatttgcatcgtttcctttctctgagatgagtttgcggcggcgacgttctgttttcaggtcggaaacatcgcggttgatgccgctgtgctgcagccacatggcgatctcgccgccgatgagcaaaataaacatgcaggcatacagccataccattaaaatgaccaaagcggcaaggctgccgtagatggtggcgtagtttgcaaagttctccacgaaaacggagaagataaacgagaataagacccacccggcagaagccagcgctgcgccgaaaaacgcgttgcgcagggatacctgcttgcgaggaatggcaatgaacatcaaccagaagaagaacagcagcaggacataggacatgatgggtttaaagcggttgatgagcgtcgggaacgccggcggcatcaccgtgatgagccattcatacagcatgtcgccgaagaccatcaggcccatgctgacaagcagcgtcatgacgaacacgaccgtgtataaaatggctaaaatacgcataaaaatatagttgtggtttttggaaacgtcaaaaacggagtaaagtcccttgatcagcgccaccatagccgtggaagcggaccaaacgcaggtgatagccgtcatggaaatgagcgtctgcggcgcgtgcacctcttgaaataagtaactgacaacttcttccaccggcggcgggagcatttgaacgaatgctacgagaagcgaggtgtcttcaaaccgaatgacctgcaaaagggccaaaatcagcatgaggaacggaatgaacgaaatgaggatccagaacgaaacctgcgccgcgtaggagtcgatggcgtcgttattcagtttttcataaaaccagccgaagtgctttttcagcagaattttcacggcgctttctcctttctcacgctttccttatgtcttatcgcgcaatttgagaacagtataacacagaaatatagaattttccagtgaaaaagcacttgacaaaagaaaaaatgtgtattataataaactacgctacattatagagcagatatggcggcatagctcagttggctagagcattcggttcatacccgaagtgtcgatggttcgaatccatttgccgctaccatctggcccggtggtcaagcggttaagacaccgccctttcacggcggtaacacgagttcgattctcgtccgggtcaccagaaaaaagagccttgtcaaaaagacaaggctcttttttcaacgaaataaatcccttcggaatttgtgaaattgcccttcgggcagtgaaatgttgctgcgcaacgtgaaatacctgtgggtgtgagaggctttatttcatttcaattgatgcgtagcatcaaatttcacatttcgcagcgcgaaatatttcacttaaaaatgtcgaattttgtcaaataaaacacgccgtctgcgaaccgaaagcggttcgaggacggcgctttaaaatttatttataaattacacaaataatcattcaaagtcgtgggtgtaaatttcgctgccgtcgccgttcaagtagacgaggcggacgtgcacgccggagagacctacttcgctttcgagcgtatcggcgatatcctcaaaggtagaagcattttcttcgcagccttcttttaaagcatcgagcacggactgctttatgtcttcgtcggagaggtcgtattcatctgtgaactgatattcatagacgagcgcattgccgtctgcgtagaccttgatcgtcatgctgtcatcggtctgattttcaatttcggcatcgatggacgcttttacgtccggatcggcgagataatcggcgagggaggcaaacatggcttccccagtggaggccgaagattcggattcggaggatgcagtgctgtcttcggaggaagaggagggctcggcggaggtgctgcttgtgttcccccctacgatggttttggcggaggtgcagcctgcaagcgcagagagcgtgagcagaccggcgagtgccaatgcgcagagttttctgagtttcatttgattttacccctttgtactctataaaaatagagaaaattttggcggattttgttgccgccatgcactcaatatagcacatgggtttacaaaaatcaagaagcgtacggcgaattaaaaatttggagaggaaaggaaaaaagcgggacaaggatttcagacgacaagacggtaaaattcatatttcttggaacaggcatgaccgaaatcatgcctgttccgcttttatcggctcatcttttttgaccatcgaccgttttgtaagcttattatgccgttcgggcataaaggctgtgttaagcaagaggactttggggcgattgaaacagcaaaagactggcttttacaacgcggttgacaaaacggatcatttcctctttgctgtacttgtcatagccctccacaacgacatgcatcaaaccgtttgacagatgggtatacatcatctcaagctctgtttcgtcggcatagggcagctctttccgccagtaagcaatgctttcctccttggccaaagcaatcatccgcatgaggaccgttgcgcttgtattccccagaatcaaaacccggcaggcggcctgattctgatcgaccatatcgtaaatggcttcgatcagtgccgtcacatcaaacaaattgacatagcgaagggatttctcaaaggcatcgatgagttcattctcaatgctctccatcagggcaaagcaatcgctgtaatgggcatagaaggtggcgcggttaagctgcgccagcgcacaaacctctttcaccgtaattttgtttacgggtttttccttcagcagcttcagaaaagactgcttgagcaccatttgcgtatagcgtttccttgcgtccattttctccatatagagtccctcccaaaaaagtttacaaagaaaagcaacacttcaacagacaatgttgcttttctttcagtcgtacggcaagtgctgattgtttccgtttttcctctcaagtatactgtacttgtgaaagataatcaacacttgtatgcttatttgagaggaggctttttgtatgtttgatcaatatcttgttacaggcgctaccggcttcctcggtagggctgttgcggaggagctggtacgccgcagagcgcaagtgcatgcgcttgtgctgcgtgatgacccctatatccatttgctccccaaagaagtccataccgtcatcggtgatgtgtgcgtggaaagctcgttgacagacttctttgcagatgccgacagccgtacctgtgtgattcactgcgccggtatcgtctctgtcgcgtccagacccggttcgaagctctatcaggtcaatgtaggcgggacatggagggttctccggcaatgtatggagcataatgtgggcaaaatggtctacgtcagctccgtccatgccataccggaaaagtcaaaggattgcatcattacggaagattgcgaattctctccggggcttgtggacggagattacgccaaaagcaaggcaactgcaacagagctggttttcgatgcggcggagcgcgggctgaatgccagcattgtctttccatccggcatcatcgggccgggcgatatacagggagggagcttcacctcaatggcgaaatcttttcttcgcggaaagctgccctttgccgttcgcggcggatatgacttcgtggatgtacgggatgtggcaaaaggcattctcgactgttccgagaacggagaacccggtaagggatacattttgtccggccactatgttaccattcgcaagatgcttcagcttgtgggaaaggccgcaaagcagaagtatcgccccatctgcctgccactggggcttgcaaaactggcggctccacactatgaacgtcgaagcctgaagaagcgaaagccgctgtttttcacaccttattccgttgccgtccttgcctcaaacggacaattcagccatgccgcagcatcggaatgctttgcatatcatccgcgcccggtgaaggatactttgcgggacatgacagcctggcttttggagcagaggagaaagggcgaagtgtgacctcacctaaaagcaccttgggcaggctgcgcatgctattggcatgatctgcggttccggttgctatccgtatgtatcctgtgatataatttgaccaagagaacgcggaaaagccgtccgacccgcgctttcaggaacggcaccgaaattccggcagggcaagcgcctggcggatacccctctgcatttggagcacccgcaaaaaggaagtgaacgctatgacctgcgacgagactttttaccaccgatatttgaacggcgacgatgcggggctggaggccctgatgaaaaaatacggcaatccgctaaccctgtatattgacgggtatctgcacgatgtccacgaagcagaggatttgatgctggatgttttcgcctatctgttcacgaaaaagcctcgcatccgggacggtggcttcaaggcatatctgtataagacggcgcggaatatggcgctgcgccataagagcaagcggaagtgtctgttccgtttggacgagctgaccgatgaatcagacgggcagctgcttgtggaggaggttatccgaacggaagaacgaaaccgcattctgcacttctgcatgggtgaaatgaatccggattaccgggaggttctatatctgacctattttgagggtatgagttacgcacaggcggcggaggttacgggaaaaacggtaaagcagattaccaacatggtgtatcgcggaaaggaaagcctgcgaaggcttctggaacgggaggggattacaaatgcggagtcatgaagaacgcgtcgcggagacaaagcggcgcatcgccaagatggagcgggagaaacggctgcggcgcaatacgattaccgcggcttccgctgtggcggcgtgccttgcgctgattgtgggtgtgtctttcgtcatgcctgatattgccgtaaaaattcgaaccggcagctatgcgggctttgaaacggcggcaagcatctttcacggcggcgcggccttgggatacatcgtcatcgggtttctggcgtttcttctgggcgtgtgcgtgactgttttgtgcttccggctgcggcaaatgaatcgggacgacacacaggataaggaaagcgaggaacggcatggagctgattgagaacctgctgcagctgctggtcacgttcgtcggcgcgctgctttcgggcatatcctaccggaaaagccgcaggcaggcgtattttctgctgctgtgcttctacggctgctttgccctcggcgcgctctactggacgctgtatctgctgctgttcgataccacgccgaaggtgttttatgtgtcggagttcggctgggtggccagtgtgatttttctgcggatattgcaggccacgctggcaggcgcagatgagcacagcttccgctgtcgcagggcatggcttgcgcctgcgttcggcgtgccgctgctggcgttctactgcacctttggggacattctctccaacctgatctggtgcggcatgatgatatggctttcctactgcgccattcgagggcttgcctatgcagagacccggacgggcgcggcgcggaatatgcggtgcttccacatcggcgtgctgtgctttacgttcgcggagtatctgctctggacggcgggctgcttctggccggatacttccccggcaagccccgtcttctggtgcgatatgctgctgacgctgaccatattggggctgctgcccgctgtgagaaaggcggtggacgcatgacctatattgaaaacatattcctgtgcatggtgtccccgctgctggtggctgctctgtgcatgggcaggcggcatctccgcttttttctgttctgcatcgtcggaatgggtgtgtgcctgctttcggcctacatcaatactttcctcgcgtcggtgtgtcaggcggacgcccttgccgccacggcggagattgcgccggtggtggaggagatgatgaagctgctgccgctggtgttctatcttctggtgtttgagccggagggagataaaatcaaggctgccgcaataacagttgcccttgcctttgccacctttgaaaacgtgtgctatctcattcagaacggagcagaccgtttctccttcatcttcttccgtggcttcggcacgggagccatgcacgttctctgcggtctgatcgtgggcggcgggcttgcctatgcgtggcagcggacatggctgaaaattgcaggcacctgggggctgctgggcgcggccatcaccctccacgccgtttacaatctgctcatcgcctacggcggtgcggcgcagtatgtggcctacgccctgccggtgctgctggtagcggcgggaaggctgtctacgttccgtttatcgcggatgaaataaccgaacattcacaccttgagagctgcttttttggcggctctcaaatttttttggaaaattttgcgttttgggtgagagtttttccgattttatgtacctatataagtgaaagggtttttaagccacagtttcagacaaaccggagaggagggtcaaattgtatgtacgataccgcaagacgggtcgcactcgtccggcagcgggtacggaaaaacacccgccgaaggcagcagcacggcatatacggactgagtgccgcgtgtatgctgctgttcgcggtgctgatgcaggcgataagcacggtcgtcaggccgggacagaccgccgcatggggcgtgttcggcgcgatgctgctgcgcgaggatgcgggcggctatgtgctggtggctgttgtatcctttgccgctgcagcggcaatcaccgcgctgtgcatgcggttcaggatcagagaaaaccggaaaaagggcgggacaggcaagccggacccgcaggaacaggagggaaaaacgacatgaagaaacgaatactcagcattctgcttctatgctgtatggtgctgaccatgatgcccgcgacggtctttgcggcggatggagaggttgccgcacgcgcatcggaaacgggcggcctgtatgaacaccacgaggcctgcggcgcagacccggcaggggcatccgatactatgatgccaaaaacgaggagcggggcagtccgtcccgctgccacccaatacacctatacgctgcattacgatgccaacggcggcagcggcgcgccgccaagtcagagcgtgaccagttcggaatttcatgtatgggttcccatatcagaaataattccaacccgtgacggatataccttcataggttgggcgaattatcggactggtacgccgatatatggcggaaacggcggttataccgagtgtctggtagtacatggggttgatatgagcacaaccatctatgccatatgggaggtgcacaatcatagctggggcgaatggacctccaacggcaacggaacgcacacacgcacctgtaccgcggacagcagccataccgaaacgggcaactgctccggcggcaaggcaaccagcacggagaaggctgtttgcgaaacctgtcatacggcttacggagagcttttgcagcctgccaaaacggtcatcaccaccccgcccacgctgcgccctccggcctatgtcggcaatgagtacaccgacagggcgctcaggggcggcgaagcgaaggccgagagtacgggcgtcgtcgttcccggcacgttccgcttcaagcactatgagggcggcagagtatacccgggcgaaaaccgcatggagatcctctttacccccgacgatacggaggcatacaccacggcggaatgtattattaccgtgatggggacaaagcgcacggtcacaagagttccggatgacgtaatcatcacggacaagcccattggcacggcgtttgagaatctggggcttccttccggcgtcaaggtagagaccaacaccggcgcgagctacagtcccgtgcccgtgacatgggacggctccacctatgccccgaacaaatatggcgagcagatcattaccggcgagctgcatgttgaacagagtcactacaaggatgatctggagccgacaagcgtcaaggccaccgcaaggataacgctcattgacgaccgtgtctttacgcccacgctggagccgcccacctattccaagcagctctacggcggagatctgtgcttccttgtgtttgccgacaaatatctctccggcgggacggccacggcgaacggcgaaacggtttccggcaaattcacgctggacaaagatcagaaaatatacggacattccttgacggcgagcacgctattgcaggcagggtcgctgcagctgaaggtcatcttcacgcccgacaatctaaagcggtacaacagggcggaatgcaccgttgatgtgaacgtcgttccccgcacattcaaggagaccagggccggacacattaccaatgaaaaattcggaacgccatttgaggagctgaatctctcggattcattcagcttttatgcggtgggcgatgaaaaagatcccgagggaacagggatggacttcggtatgaatgtcgtcacctcatgggacagctcgacctacgaccccaattcgtttgaggagcagaccatctacggcgaagtcaaccgcgccgaattggagaagtatttcaccatatcggaaaacgtcgacctccgagctgtgagaaaggttcagctgcagcctgacccgaccgagacggagatcacgcagctgcccgtattccgatggaagaacggcgactttacgttgcccgacaacaccatattcacctggcgaaagcttcaggtgggaacctacaacgatgaagtcggcatgctcgtcggcggcgtggcaaaggtcaagggtacggataccgtcgctcccggcacgttctccttcaaaaataccccgccgttctacctccggactccgggtgaacacgatgtgacggtagtattcacgccggacgacctgcgtctccacaagccgacggagattaccatcaaaatcaacgccatcaaaaacaccatcagcaatatcgatgaaccggatcccattaccgataagccgttcggcacgccctttgcagagctcggcttgccggaaaatgtgtgcatcaatgccgttgacggcgcatggcgctggatcgacgtggcatgggatgaatcgtcctatgatgcggagtccgtggattggcagaccatcatcggcacgccggtgcttagcgaagatgacggagacatctttcagcagtcggagccagcggtaacagccgcgattcgggtgaagcttatcgataaccgaccccctatgccgccgacaatcgtcgcggaaagcctgcccgacggcatggaaggcgaggcttacagcaaccgcttgaccgccaagggtaccgcgcccatcacatggagcattgtgagcggcgtcctgcccgagggacttagcctaaacgaggaaacaggagagataagcggcacgcctgccggggaagggaccgaggtctttaccgtcatggcggtaaacgatttgggtgaagatattaaggagttttccatcacgatagccaaggctcccgagacggaatacgccgtcaccgtcagggacgacggtcacggcacgggcagcgcggatcccgcctcggcgacggccggaacggaaatcaccctgaccgctacgccaaacgcgggctaccattttaaggagtggcaggttatgagcggcgacgtgacggtaagggacgacaagttcactatgcccggcagcgatgtggaggtcaaggccatcttcgaggaggatgcgccgcctacgcccacggagtacaccgtcacctttgacggaaacgacggtacgccctctgtcggcagcatgaccaccaccaagcagaagctgacctctttgcccgatgcttcccgcagcaagcacagcttcaacggctggtacaccgaaaagagcggcggcacaaagattacgacggatatcgtgttctctgcaaataccaccgtctacgctcactggacgcataccggcgacaacaatccgcccgtcaactactacacgctgcgctttgaaacaggcggcggcagtgctattcccggcgtgcgggaaacgtacaatacctacatggatttgaccaagtatgttcccactcggcacgggtatacctttgtcggctggtacagcgaacagagccttgtgaacaaggtctcagacatttatctgaccggggataggactgtgtatgccggttggcgcgcggttacaatcccgcagaccggtgacagcggtcaaatgaatttgtggagcaccgcgctatgtgcatcttttgccggatgcgttgcactgatcgtatggaaaatcaggcggcgggagaaaaaatcactgtaaatcctcaaaaaggaaaagtcttatcttcaggggcgcgggcaaataacccgcgctccatactatttcccaaaagcagtaaggtggctgccctttaaaaggacagccaccttacttttctgagaggataaatccgtttgtcagcctgcatcggcggcaagggcctggtcgatgagcttttgcagcgtctccgcttgatttttttccgtgatggcgcctacgatggggtcgcccacgatgttgccgttgcggtcaaccacataagtggtaggataggcaaagatgttttcggtaaactttcctgcctcaccgtcggaagcgaaatacacgttctgataggttgcgtttttcttggcaaggacatctttcgcctcggaaattgccgcttcgtcgccgtccagcgtaaaggtgttgacaccgatgagtgcgccgcccttctccgcgagttctttgttcagtgcgtccaactcggcaagctcgcccacgcaggggctgcaggtggtgaaccagaaattcactacggtgacggcgttggcagagaacagctcgtcacttttcaccgtatttccatccaggtccttgccctcaaaggtggggaatttctgcatactgccgtcatcgggcggcgtggtcgtgtcgttgcctgcgggcacgctcatagcgccatccgtagattcctgtgctgcctcggggtacttttcctcaatcatggtcagcttggtttcgatgtcgcggattttctctgcttcgccctgaatcagtttcagctcatccgctgtaaactgatccttggcggattcaattgtactgagtaggaaatcaccgtagtttttgccgtcctcctgcatggtcatgcccttgtcggctgccatgaataccttttcccaaagggctgtgttctccgcgagaatggcattttcctgtgccatcagatctttgtgcatggcgaccgcttcctcggcattcttcggttcgctgctcattccgtccgctttgtctccgttctttgtgccgcaggctgtcaaagacagcatcatcagggcgagaagcagcagtgccagcaatcggccggccgcattcgttctattcgttttcatctgtttttttctccttgttattattgtttattattttctgcggctttttttgccgcttttgttttatctttaccgtctccgaagccgtaacggaagcgcacggcgcccgtcggacaggtgcgtatgcacattccgcagcggatgcactcggtatggttgggcgccttcgttacgtccacatccatcttgcaggctttggcgcattttccgcaggatacacacttgtttttgtccacctttatctgaaagagagatacccggttgaacagcgcgtaaaacgcccccagcggacagagccacttacagaagggacggtagaatattacgctcagcacgatcactgcaagcagaatgccgaatttccatgtaaacaggctccccagcgctgaccggataccggaattggcaagggacagcgggatggccccctccagtacgccttgcggacaaaggtatttacagaagaacgggtcgcccatgcctacatcgtttacaaggaacgccggcagcaggaaaaccatcaccagcagtacggcgtacttgaggtatcgcaggggcttgagtttctttgtggagaacttcttcgtgggaattttatgcagcagttcctgaaaccagccgaaggggcacagaaaaccgcagataaagcgtccaagcaggacgccgagcaaaatgagaaagcctgtgatataataggaaaaactgaacttggaagagcccactaccgcctgaaacgccccgatgggacaagcgccggaggctgccgggcaggagtagcaattcagcccgggcacacagacggttttccctgcgccttggtacagtttgcccttgagaaagttcggcaggtgcaggttggtcaataaagctgcccccgcctgtatccagccgcggaagcgggacataatctgtgacgcgcccgaaaatttcttacccaatgcctacacactccagacataatttaatcgctttgctcagtaccgtcgcggcctcgccgcgccatgcgccgaagcacagcatggcgatacccacaaccagcaacatggcctgcgccgctgctttttttgcacagctcaattttatcaccctttcgctttttctgccatcatcatagcacaggaaagataaaatccctgttaagaacgaaaatttaatgcagatcttatctgcttttgctataataaagaaaaaggaaatgaaaagggggactcttatgcaccttttggtaattgaagatgaacgcgccctatgcgagacgattgtccgcagtttgcggcgcttggcatacagtgtggactactgctacgacggggaaaaggcgctggaacttctgggtgtggagcgctacgacttggtacttcttgatctgaacctgccgggaaaggacggcatgaccgtgctgcgcaccttgcggcagacagaccgcgagacgcgggtgctgattctctccgcacgcggcgaggtggaggacaaggttgaggggttggatgccggggccaacgactatcttgcaaagccctttcacttggctgaactggaggcccgcatccgcagcctgactttgcggcagttcacccagcaagccgtgttgctgatctgcggggagctgacgttcgacacacgctcccgcaccgctgccgtcaacgggcagcccctgacactcacacgtaaggagacgggcattctggaatatctgatggtgcatcagggacggcctgtgagtcaggaagagctgatggagcacgtctgggataacagcgtggacagcttcagtaattccatccgggttcatatctccgccctgcgcaagaagctccgcgccgcgttggggtttgaccccatccgtaatcgcatcggcgaaggctatttgatgggaggagaggaaacatgaagcgactttccttgcagtggcgcatcactctgatgactgtcctgctcattggtgtcacctgtgttgtcatgaatctgctgctctgttcctccggcgtgtactatatggacacaatcgcggacaccttacagggaggcgacacggttattatgaacagtgaaggcgcagagagctttaatccgcagctcgtaacgcccgatgaggatctgaccattgttgtcaacggagcgcaggggcgctttcgcatgaccaactggtatattacggctgtggtgacactgcttagcggcgttctggcctattttgtcagcggacgcgccctcaagccgctgcgcagctttgtgtctcaggtggagaaggtgcagctgaacaacctggcggatatgaggattaacgagaatgttctgccggagtttcggcagctgagttactcttttaatcagatgctggagcggttggacaacgcctttgccgcccagcggcagttcaccggcaacgctgcccacgaactgcgcacgccgctggcactgatgcaggcacagctggagctgttctccgcggagcatcccgatatgctgccggaaacggcgaagtttctcgcacttttgcgggaacagacggagcgactgacacagatgaccaaaacgctgcttgaaatgagcaatttgcagcaggtggcgcgaaacgagcagattcagcttgccccgatggttgaggaggtcttcacagatctcgcgcttttggcagaaaagcgcaatattacgctggagatggagggagacggcttcctcatcggcagtgatgcactgatttaccgactgctttttaacctgacggaaaatgcagtcaagtacaaccgttcgggcggctcggtgaaggtttctgttacgcaggagccggaaaagcttctgatccgcgtttccgacaccggctgcggcgtcccggaggaataccaacagagcatctttcagcccttcttccgggtggataagtcccgcagccgggagtacggcggcgttggactggggctttctttggtgtgggagattgccaatctccacggtggtggcgtccgggtggaggagagctcgaagaagggcaccacgattgcggtggagctgccggtacagggataaggcactcgaaatctccggtgagccgttcgcggaatacgaacggatttagaaaaagcagcggttttgcgatgaacagaagggaaggcgatgaacacatgagaatcttatatgagctgtcttggttatgggaaatgctgggcatcgcgcttgctgctgccgctgtctgcgtgacttgtgccgcactgatttgcaaagcaacgaagaggcggcccaacaaaaaaatgctggccgtcgtaggggcggcggcatttgccggtgcaattctggcagtccttctgattgtgcggacgccgatgccgctttgaagatatttaatccttcggcagcttggtcgacaacacgaagaagcctgccgacacaatttatgatcggagaatatataggctgtcaaaaaaactcatgctttcaagcggtgaaagcatgagttttttagtgtgccggtatggatagccgctgatgtggtcggctttttatctgcgattaaatgtgtcgttttttaagaagcagggcgagtgccgcgaggctgcctgcgcagagcgtcagccaaagtgcggggggcaaaatcatcgcccgttttggggtggttcgtcgggcttggggttgcggtcggcacggcagtcggtacggctgtgggagctgccgtaggtgtcgccgtcggttccgctgtgggcgtggcggtcggttctgcggttggggttgccgtgggctccgctgtcggcgtggccgtcggttccgccgtgggcgtggcggtgggctctgcagtcggtgttgccgtcggttccacggtgggggttgctgtgggttcaacggtaggtgttgccgtcggctccggggtcggggtcagctcgggcacggcaatggtgaaggtgatattcagcccgtctccgtcgcgtgccagagacaagtccttgacggatgtacctgaagacgaagggtactttacggagcctgttacggctgttactttataatttcccggttctaacgtgtaggaaattaaaatacttacccgtgtagaatctggtaatatgtcatcatcctcgtcaaaatttacatatgtgaatgtcggatctgtgtcgatcaccgcaccggtcagtacggttgtatcgccggtatctgtattcgtaacggtgaaggacgtgtctgctgacagtgacagatcattgatggtaatatcccgtgacggttgagtactggctcctttgggtacgagtagtgtaaacccaatgcgcagctgcccgcttgtaggccccggctgtcccgactctgcgcctacgatcaccacatcatcatattgacagcctgccactgagagcagagcgaacagcagaatgaacacgactccgatttttatacccttgtttttcacggcgttacctcctcataaacttgaacggtgtttgttgtgtttattataccatgacatggtgtgaacgtcaattagaatatgcttagaatttattcatttttattttacagcgggcaaaattttccgttgcagcgggcaaaacggtttttcttgcaaatgggtgttgctatctgccgtggggtatggtaaaatcaagctgtatgacccgttctataataagaagaacgaggaaaaagagaggattggttcaaatcatgaaaaatataaaaaagctgctggctgttctgctggccgcgctgctgtgcgtatctgtgacggcctgtgcaaacaacagctcttcaagcacggcggtcgcaacgctggagacgtcttccacggcgagcgagggcgagaccgcggagagcaccgacaaagaccctgcgggctatgacgatgatattcagggcctttgcaagtatcttgaagactgcaaggtggcagcgggcgaaaaggtgcagatgtcttacgacgtcatcggcgccgaaaacggctataaatatgtataccgctacgcagattccgctgtgcagcttgaagtgtatgagttcccggcggagctttccgagaccgctaaggcgcttcaggacgctgtgcgcgcagacggcacgtttaaggtgctggataacaccgtgccgggttatctttcaaacgacggccgcttccttttgatctacaccgacgcgaagtcggaaaaggaagacgcgaataaaacacacaaggagcacgttctggagtgcttcaatacgtttgcggacgcaaaggcaaaataaaaattatagggggcggaaaggcatgtgcttttccgtccttagtgctttcttattttaaaaaatcggcggcggttaggcataaataggcatgaaacgcgccgagaggggagttgtacaccatgaacacacaagataccgtgcaccgcaaaagcgccgcagagctgcgcatacggcgcgtgatggatgcactggagaaaaacaacatgcaggcgtattatgcgcccacatgtgcggacgccgtaaaaatcgcaaaagagctgctgcagccgggcgatgtgatttcctgcggcggcagcgtgacgctggatgagaccggcgtgatggatttaatgcgctgcggggactatgaatttttggacagaacagccgcgaaaacgcccgaggagcgcgagaagctgtaccgcgaggtgttttcctctgatgtgtttttgacgggcacaaacgccgttacggagcacggagagctttataatgtagacggcaacggcaaccgcgtggcggcgatgctgttcggcccgaaaaaggtgctggtttttgcggggtgtaacaagattgtgcgcgatatagacgacgccgcaaagcgcgtgaaaagctgtgcgacgcccgcaaatgccatgcggctgaatttggacacgccgtgcacgcacggggcgtgtcccggcacggacggcgagctgtgcgcgggatgccgctcggaaaatcgcatctgcgcgatgtacacggttttggcacgccagcgcgtgaagggcagaattcatgttattctcatcggtgaggaggtcggttactgatatgaaagaaaagatacaggcttttatggcaaaacgacaggcgaaaggaaagcggtcctacgagatcgacatgtgcaacggtccgctgctgggcaaaattctgcgctttgcggtgccgctgatgctttccggcgttttgcagctgttctttaacgcggcggatattgtggtggtcggccgctttaccggccacacggcgctggcggcggtgggctctaccggcgcgcttatcaatttgctcatcaacgtgttcgtcggcctttccatcggcacaaacgtgcttgtggcgcgctattacggcgcacaggatgcaaagcagctgagcgagaccgtacatacctctgtgctgacaagtcttgtgagcggtgttatattgattgccgtgggcgttgcgtttgcggagccgctgctgaccctgatgggcaccccggaggacgttttgggtcaggcggcgctttacatgcgcatatactttgtgggcatgccggcgatgatgctgtacaacttcggcgcggcgattttgcgctctgtgggcgacacaaaacgcccgctgtactttttgaccattgcgggcgttgtaaacgtcattttgaatctgttcttcgtcattgtgttccatctcggcgtggcgggtgttgccattgcgacggtcatttcgcaggtgatttctgcgggacttgtgaccatctgcctgatgaaaacgaacgcttcttaccgtttggagctgcataagctgcatatctataaagataagtttttcggcatgatgcgtgtcggcctgccggcgggcatgcagggcgcggtgttctccatttcgaacgtgctcattcagtcctctatcaactcgttcggctccaccgttatggcgggcagcacggctgcggccaacattgagggctttgtgtacactgcgatgaacgcgttttaccagacggcgctgtcctttaccgggcagaacatgggcgcgaagaaatacgaccgcgtggcgaaaattctgcgcatctgcattttgtgtgtgaccgtgacgggcgttgtgctcggctgcggcgcgtatttgctgggcacacctttactttctatatatacgtctgacccggaggttatccagtacggtttggagcgtatgctcattgtgtgcgtaccgtacttcctttgcggcattatggacacgcatgtgggcgttttgcgcggcatggggtattcgatcatgccgatgattgtatcgcttacaggtgcgtgtgcgttgcgtgtggtgtggatcctgacggtcttccagatgaaccgcacgctgtttatgctgttcctctcgtacccggtgacgtgggccgtgacggcggccgcgcattttgtgtgctaccttatcgtgcaccataagatgatggaaaaggcgaaagcggagcaggccgaggcggcaaaagcataaagtatacttatatatatatatatttaagaagaaacgcgttgtgggatgaccgcagcgcgtttcttctatatataaagagaaaaagcagaaccgcaaaacaaaaacgcgtctttctataactatatataagaagatatagggctgcattgtaaagctttacgataacttcacggcgattttaagtgttttaaaaacttttttcggataaaatcagaaagattatgaggagattcagaagtgaaaggacactgatgcgccagatatataagaagatgtgcttgaagctttggggtacagagaggggcttttgcaactttaagaccaccttttcaaaaagtttttcttgattttttcaaaaaaatttcgtaaaatagtttgcgtaagccatgtatatgggcatgtaaatgtaaaaatgcccattcgaagatacactatatattgtgtttaaatcaaggcgcaacatataaatgtagtttttcgaaaaaaacttaaaaaaactttcaaaaaagtgttgacaaaaggggttgtacgtggtattatagtcaagcgctcgagagagacggcaaaaaactgaaagcgaaaagcttaaaaggaaagccgctcgaaagagagcacaggaccttgaaaattaaacaacgagagaaagaatggaacctgtaatttctttgagaaactcaaagaaacttacgagaaacagaactcaacaaatctgtgacgaacgtcagaacgacgttatgagcgaattaaagctctgaa
